(19) United States
(12) Patent Application Publication
(10) Pub. No.: US 2010/0286048 A1
(43) Pub. Date: Nov. 11, 2010

(54) Albumin Fusion Proteins

(75) Inventors: Craig A. Rosen, Laytonsville, MD (US); William A. Haseltine, Washington, DC (US)

Correspondence Address: FINNEGAN, HENDERSON, FARABOW, GARRETT & DUNNER;LLP, 901 NEW YORK AVENUE, NW, WASHINGTON, DC, 20001-4413, US

(73) Assignee: Human Genome Sciences, Inc.

(21) Appl. No.: 12/570,397

(22) Filed: Sep. 30, 2009

Related U.S. Application Data
(62) Division of application No. 11/545,766, filed on Oct. 11, 2006, now abandoned.
Application No. 11/545,766 is a continuation of application No. 11/264,096, filed on Nov. 2, 2005, now abandoned.
Application No. 11/264,096 is a division of application No. 09/833,245, filed on Apr. 12, 2001, now abandoned.

(51) Int. Cl. A61K 38/38; C07K 14/76; C07H 21/04; A61P 35/00; A61P 9/00; A61P 25/00; A61P 37/00; C12N 15/63; C12N 5/10

(52) U.S. Cl. 514/15.2; 530/362; 536/23.4; 435/320.1; 435/325

(57) ABSTRACT

The present invention encompasses albumin fusion proteins. Nucleic acid molecules encoding the albumin fusion proteins of the invention are also encompassed by the invention, as are vectors containing these nucleic acids, host cells transformed with these nucleic acids vectors, and methods of making the albumin fusion proteins of the invention and using these nucleic acids, vectors, and/or host cells. Additionally the present invention encompasses pharmaceutical compositions comprising albumin fusion proteins and methods of treating, preventing, or ameliorating diseases, disordrs or conditions using albumin fusion proteins of the invention.

### CROSS-REFERENCE TO RELATED APPLICATIONS

[0001] This is a division of U.S. patent application Ser. No. 11/545,766, filed Oct. 11, 2006, which is a continuation of U.S. patent application Ser. No. 11/264,096, filed Nov. 2, 2005, now abandoned, which is a divisional of U.S. patent application Ser. No. 09/833,245, filed Apr. 12, 2001, now abandoned, all of which are hereby incorporated by reference in their entirety.

### REFERENCE TO SEQUENCE LISTING ON COMPACT DISC

[0002] This application refers to a “Sequence Listing” listed below, which is provided as an electronic document on three identical compact discs (CD-R), labeled “Copy 1,” “Copy 2,” and “CRF.” These compact discs each contain the file “06832.0018-02 Sequence listing.txt” (2,881,536 bytes, created on Oct. 8, 2006), which is incorporated by reference in its entirety.

### BACKGROUND OF THE INVENTION

[0003] The invention relates generally to Therapeutic proteins (including, but not limited to, a polypeptide, antibody, or peptide, or fragments and variants thereof) fused to albumin or fragments or variants of albumin. The invention further relates to Therapeutic proteins (including, but not limited to, a polypeptide, antibody, or peptide, or fragments and variants thereof) fused to albumin or fragments or variants of albumin, that exhibit extended shelf-life and/or extended or therapeutic activity in solution. These fusion proteins are herein collectively referred to as “albumin fusion proteins of the invention.” The invention encompasses therapeutic albumin fusion proteins, compositions, pharmaceutical compositions, formulations and kits. Nucleic acid molecules encoding the albumin fusion proteins of the invention are also encompassed by the invention, as are vectors containing these nucleic acids, host cells transformed with these nucleic acids vectors, and methods of making the albumin fusion proteins of the invention using these nucleic acids, vectors, and/or host cells.

[0004] The invention is also directed to methods of in vitro stabilizing a Therapeutic protein via fusion or conjugation of the Therapeutic protein to albumin or fragments or variants of albumin.

[0005] Human serum albumin (HSA, or HA), a protein of 585 amino acids in its mature form (as shown in FIG. 15 or in SEQ ID NO:18), is responsible for a significant proportion of the osmotic pressure of serum and also functions as a carrier of endogenous and exogenous ligands. At present, HA for clinical use is produced by extraction from human blood. The production of recombinant HA (rHA) in microorganisms has been disclosed in EP 330 451 and EP 361 991.

[0006] The role of albumin as a carrier molecule and its inert nature are desirable properties for use as a carrier and transporter of polypeptides in vivo. The use of albumin as a component of an albumin fusion protein as a carrier for various proteins has been suggested in WO 93/15199, WO 93/15200, and EP 413 622. The use of N-terminal fragments of HA for fusions to polypeptides has also been proposed (EP 399 666). Fusion of albumin to the Therapeutic protein may be achieved by genetic manipulation, such that the DNA coding for HA, or a fragment thereof, is joined to the DNA coding for the Therapeutic protein. A suitable host is then transformed or transfected with the fused nucleotide sequences, so arranged on a suitable plasmid as to express a fusion polypeptide. The expression may be effected in vitro from, for example, prokaryotic or eukaryotic cells, or in vivo e.g. from a transgenic organism.

[0007] Therapeutic proteins in their native state or when recombinantly produced, such as interferons and growth hormones, are typically labile molecules exhibiting short shelf-lives, particularly when formulated in aqueous solutions. The instability in these molecules when formulated for administration dictates that many of the molecules must be lyophilized and refrigerated at all times during storage, thereby rendering the molecules difficult to transport and/or store. Storage problems are particularly acute when pharmaceutical formulations must be stored and dispensed outside of the hospital environment. Many protein and peptide drugs also require the addition of high concentrations of other protein such as albumin to reduce or prevent loss of protein due to binding to the container. This is a major concern with respect to proteins such as IFN. For this reason, many Therapeutic proteins are formulated in combination with large proportion of albumin carrier molecule (100-1000 fold excess), though this is an undesirable and expensive feature of the formulation.

[0008] Few practical solutions to the storage problems of labile protein molecules have been proposed. Accordingly, there is a need for stabilized, long lasting formulations of proteinaceous therapeutic molecules that are easily dispensed, preferably with a simple formulation requiring minimal post-storage manipulation.

### SUMMARY OF THE INVENTION

[0009] The present invention is based, in part, on the discovery that Therapeutic proteins may be stabilized to extend the shelf-life, and/or to retain the Therapeutic protein's activity for extended periods of time in solution, in vitro and/or in vivo, by genetically or chemically fusing or conjugating the Therapeutic protein to albumin or a fragment (portion) or variant of albumin, that is sufficient to stabilize the protein and/or its activity. In addition it has been determined that the use of albumin-fusion proteins or albumin conjugated proteins may reduce the need to formulate protein solutions with large excesses of carrier proteins (such as albumin, unfused) to prevent loss of Therapeutic proteins due to factors such as binding to the container.

[0010] The present invention encompasses albumin fusion proteins comprising a Therapeutic protein (e.g., a polypeptide, antibody, or peptide, or fragments and variants thereof) fused to albumin or a fragment (portion) or variant of albumin. The present invention also encompasses albumin fusion proteins comprising a Therapeutic protein (e.g., a polypeptide, antibody, or peptide, or fragments and variants thereof) fused to albumin or a fragment (portion) or variant of albumin, that is sufficient to prolong the shelf life of the Therapeutic protein, and/or stabilize the Therapeutic protein and/or its activity in solution (or in a pharmaceutical composition) in vitro and/or in vivo. Nucleic acid molecules encoding the albumin fusion proteins of the invention are also encompassed by the invention, as are vectors containing these nucleic acids, host cells transformed with these nucleic acids vectors, and methods of making the albumin fusion proteins of the invention and using these nucleic acids, vectors, and/or host cells.

[0011] The invention also encompasses pharmaceutical formulations comprising an albumin fusion protein of the invention and a pharmaceutically acceptable diluent or carrier. Such formulations may be in a kit or container. Such kit or container may be packaged with instructions pertaining to the extended shelf life of the Therapeutic protein. Such formulations may be used in methods of treating, preventing, ameliorating or diagnosing a disease or disease symptom in a patient, preferably a mammal, most preferably a human, comprising the step of administering the pharmaceutical formulation to the patient.

[0012] In other embodiments, the present invention encompasses methods of preventing treating, or ameliorating a disease or disorder. In preferred embodiments, the present invention encompasses a method of treating a disease or disorder listed in the “Preferred Indication Y” column of Table 1 comprising administering to a patient in which such treatment, prevention or amelioration is desired an albumin fusion protein of the invention that comprises a Therapeutic protein portion corresponding to a Therapeutic protein (or fragment or variant thereof) disclosed in the “Therapeutic Protein X” column of Table 1 (in the same row as the disease or disorder to be treated is listed in the “Preferred Indication Y” column of Table 1) in an amount effective to treat prevent or ameliorate the disease or disorder.

[0013] In another embodiment, the invention includes a method of extending the shelf life of a Therapeutic protein (e.g., a polypeptide, antibody, or peptide, or fragments and variants thereof) comprising the step of fusing or conjugating the Therapeutic protein to albumin or a fragment (portion) or variant of albumin, that is sufficient to extend the shelf-life of the Therapeutic protein. In a preferred embodiment, the Therapeutic protein used according to this method is fused to the albumin, or the fragment or variant of albumin. In a most preferred embodiment, the Therapeutic protein used according to this method is fused to albumin, or a fragment or variant of albumin, via recombinant DNA technology or genetic engineering.

[0014] In another embodiment, the invention includes a method of stabilizing a Therapeutic protein (e.g., a polypeptide, antibody, or peptide, or fragments and variants thereof) in solution, comprising the step of fusing or conjugating the Therapeutic protein to albumin or a fragment (portion) or variant of albumin, that is sufficient to stabilize the Therapeutic protein. In a preferred embodiment, the Therapeutic protein used according to this method is fused to the albumin, or the fragment or variant of albumin. In a most preferred embodiment, the Therapeutic protein used according to this method is fused to albumin, or a fragment or variant of albumin, via recombinant DNA technology or genetic engineering.

[0015] The present invention further includes transgenic organisms modified to contain the nucleic acid molecules of the invention, preferably modified to express the albumin fusion proteins encoded by the nucleic acid molecules.

### BRIEF DESCRIPTION OF THE FIGURES

[0016] FIG. 1 depicts the extended shelf-life of an HA fusion protein in terms of the biological activity (Nb2 cell proliferation) of HA-hGH remaining after incubation in cell culture media for up to 5 weeks at 37° C. Under these conditions, hGH has no observed activity by week 2.

[0017] FIG. 2 depicts the extended shelf-life of an HA fusion protein in terms of the stable biological activity (Nb2 cell proliferation) of HA-hGH remaining after incubation in cell culture media for up to 3 weeks at 4, 37, or 50° C. Data is normalized to the biological activity of hGH at time zero.

[0018] FIGS. 3A and 3B compare the biological activity of HA-hGH with hGH in the Nb2 cell proliferation assay. FIG. 3A shows proliferation after 24 hours of incubation with various concentrations of hGH or the albumin fusion protein, and FIG. 3B shows proliferation after 48 hours of incubation with various concentrations of hGH or the albumin fusion protein.

[0019] FIG. 4 shows a map of a plasmid (pPPC0005) that can be used as the base vector into which polynucleotides encoding the Therapeutic proteins (including polypeptide and fragments and variants thereof) may be cloned to form HA-fusions. Plasmid Map key: PRB1p: PRB1 S. cerevisiae promoter; FL: Fusion leader sequence; rHA: cDNA encoding HA: ADH1t: ADH1 S. cerevisiae terminator; T3: T3 sequencing primer site; T7: T7 sequencing primer site; Amp R: β-lactamase gene; ori: origin of replication. Please note that in the provisional applications to which this application claims priority, the plasmid in FIG. 4 was labeled pPPC0006, instead of pPPC0005. In addition the drawing of this plasmid did not show certain pertinent restriction sites in this vector. Thus in the present application, the drawing is labeled pPPC0005 and more restriction sites of the same vector are shown.

[0020] FIG. 5 compares the recovery of vial-stored HA-IFN solutions of various concentrations with a stock solution after 48 or 72 hours of storage.

[0021] FIG. 6 compares the activity of an HA-α-IFN fusion protein after administration to monkeys via IV or SC.

[0022] FIG. 7 describes the bioavailability and stability of an HA-α-IFN fusion protein.

[0023] FIG. 8 is a map of an expression vector for the production of HA-α-TN.

[0024] FIG. 9 shows the location of loops in HA.

[0025] FIG. 10 is an example of the modification of an HA loop.

[0026] FIG. 11 is a representation of the HA loops.

[0027] FIG. 12 shows the HA loop IV.

[0028] FIG. 13 shows the tertiary structure of HA.

[0029] FIG. 14 shows an example of a scFv-HA fusion

[0030] FIG. 15 shows the amino acid sequence of the mature form of human albumin (SEQ ID NO:18) and a polynucleotide encoding it (SEQ ID NO:17).

### DETAILED DESCRIPTION

[0031] As described above, the present invention is based, in part, on the discovery that a Therapeutic protein (e.g., a polypeptide, antibody, or peptide, or fragments and variants thereof) may be stabilized to extend the shelf-life and/or retain the Therapeutic protein's activity for extended periods of time in solution (or in a pharmaceutical composition) in vitro and/or in vivo, by genetically fusing or chemically conjugating the Therapeutic protein, polypeptide or peptide to all or a portion of albumin sufficient to stabilize the protein and its activity.

[0032] The present invention relates generally to albumin fusion proteins and methods of treating, preventing, or ameliorating diseases or disorders. As used herein, “albumin fusion protein” refers to a protein formed by the fusion of at least one molecule of albumin (or a fragment or variant thereof) to at least one molecule of a Therapeutic protein (or fragment or variant thereof). An albumin fusion protein of the invention comprises at least a fragment or variant of a Therapeutic protein and at least a fragment or variant of human serum albumin, which are associated with one another, preferably by genetic fusion (i.e., the albumin fusion protein is generated by translation of a nucleic acid in which a polynucleotide encoding all or a portion of a Therapeutic protein is joined in-frame with a polynucleotide encoding all or a portion of albumin) or chemical conjugation to one another. The Therapeutic protein and albumin protein, once part of the albumin fusion protein, may be referred to as a “portion”, “region” or “moiety” of the albumin fusion protein (e.g., a “Therapeutic protein portion” or an “albumin protein portion”).

[0033] In one embodiment, the invention provides an albumin fusion protein comprising, or alternatively consisting of, a Therapeutic protein (e.g., as described in Table 1) and a serum albumin protein. In other embodiments, the invention provides an albumin fusion protein comprising, or alternatively consisting of, a biologically active and/or therapeutically active fragment of a Therapeutic protein and a serum albumin protein. In other embodiments, the invention provides an albumin fusion protein comprising, or alternatively consisting of, a biologically active and/or therapeutically active variant of a Therapeutic protein and a serum albumin protein. In preferred embodiments, the serum albumin protein component of the albumin fusion protein is the mature portion of serum albumin.

[0034] In further embodiments, the invention provides an albumin fusion protein comprising, or alternatively consisting of, a Therapeutic protein, and a biologically active and/or therapeutically active fragment of serum albumin. In further embodiments, the invention provides an albumin fusion protein comprising, or alternatively consisting of, a Therapeutic protein and a biologically active and/or therapeutically active variant of serum albumin. In preferred embodiments, the Therapeutic protein portion of the albumin fusion protein is the mature portion of the Therapeutic protein. In a further preferred embodiment, the Therapeutic protein portion of the albumin fusion protein is the extracellular soluble domain of the Therapeutic protein. In an alternative embodiment, the Therapeutic protein portion of the albumin fusion protein is the active form of the Therapeutic protein.

[0035] In further embodiments, the invention provides an albumin fusion protein comprising, or alternatively consisting of, a biologically active and/or therapeutically active fragment or variant of a Therapeutic protein and a biologically active and/or therapeutically active fragment or variant of serum albumin. In preferred embodiments, the invention provides an albumin fusion protein comprising, or alternatively consisting of, the mature portion of a Therapeutic protein and the mature portion of serum albumin.

[0036] Therapeutic Proteins

[0037] As stated above, an albumin fusion protein of the invention comprises at least a fragment or variant of a Therapeutic protein and at least a fragment or variant of human serum albumin, which are associated with one another, preferably by genetic fusion or chemical conjugation.

[0038] As used herein, “Therapeutic protein” refers to proteins, polypeptides, antibodies, peptides or fragments or variants thereof, having one or more therapeutic and/or biological activities. Therapeutic proteins encompassed by the invention include but are not limited to, proteins, polypeptides, peptides, antibodies, and biologics. (The terms peptides, proteins, and polypeptides are used interchangeably herein.) It is specifically contemplated that the term “Therapeutic protein” encompasses antibodies and fragments and variants thereof. Thus an albumin fusion protein of the invention may contain at least a fragment or variant of a Therapeutic protein, and/or at least a fragment or variant of an antibody. Additionally, the term “Therapeutic protein” may refer to the endogenous or naturally occurring correlate of a Therapeutic protein.

[0039] By a polypeptide displaying a “therapeutic activity” or a protein that is “therapeutically active” is meant a polypeptide that possesses one or more known biological and/or therapeutic activities associated with a therapeutic protein such as one or more of the Therapeutic proteins described herein or otherwise known in the art. As a non-limiting example, a “Therapeutic protein” is a protein that is useful to treat, prevent or ameliorate a disease, condition or disorder. As a non-limiting example, a “Therapeutic protein” may be one that binds specifically to a particular cell type (normal (e.g., lymphocytes) or abnormal e.g., (cancer cells)) and therefore may be used to target a compound (drug, or cytotoxic agent) to that cell type specifically.

[0040] In another non-limiting example, a “Therapeutic protein” is a protein that has a biological activity, and in particular, a biological activity that is useful for treating preventing or ameliorating a disease. A non-inclusive list of biological activities that may be possessed by a Therapeutic protein includes, enhancing the immune response, promoting angiogenesis, inhibiting angiogenesis, regulating hematopoietic functions, stimulating nerve growth, enhancing an immune response, inhibiting an immune response, or any one or more of the biological activities described in the “Biological Activities” section below.

[0041] As used herein, “therapeutic activity” or “activity” may refer to an activity whose effect is consistent with a desirable therapeutic outcome in humans, or to desired effects in non-human mammals or in other species or organisms. Therapeutic activity may be measured in vivo or in vitro. For example, a desirable effect may be assayed in cell culture. As an example, when hGH is the Therapeutic protein, the effects of hGH on cell proliferation as described in Example 1 may be used as the endpoint for which therapeutic activity is measured. Such in vitro or cell culture assays are commonly available for many Therapeutic proteins as described in the art. Examples of assays include, but are not limited to those described herein in the Examples section or in the “Exemplary Activity Assay” column of Table 1.

[0042] Therapeutic proteins corresponding to a Therapeutic protein portion of an albumin fusion protein of the invention, such as cell surface and secretory proteins, are often modified by the attachment of one or more oligosaccharide groups. The modification, referred to as glycosylation, can dramatically affect the physical properties of proteins and can be important in protein stability, secretion, and localization. Glycosylation occurs at specific locations along the polypeptide backbone. There are usually two major types of glycosylation: glycosylation characterized by O-linked oligosaccharides, which are attached to serine or threonine residues; and glycosylation characterized by N-linked oligosaccharides, which are attached to asparagine residues in an Asn-X-Ser/Thr sequence, where X can be any amino acid except proline. N-acetylneuramic acid (also known as sialic acid) is usually the terminal residue of both N-linked and 0-linked oligosaccharides. Variables such as protein structure and cell type influence the number and nature of the carbohydrate units within the chains at different glycosylation sites. Glycosylation isomers are also common at the same site within a given cell type.

[0043] For example, several types of human interferon are glycosylated. Natural human interferon-α2 is O-glycosylated at threonine 106, and N-glycosylation occurs at asparagine 72 in interferon-α14 (Adolf et al., J. Biochem 276:511 (1991); Nyman T A et al., J. Biochem 329:295 (1998)). The oligosaccharides at asparagine 80 in natural interferon-β1α may play an important factor in the solubility and stability of the protein, but may not be essential for its biological activity. This permits the production of an unglycosylated analog (interferon-β1b) engineered with sequence modifications to enhance stability (Hosoi et al., J. Interferon Res. 8:375 (1988; Karpusas et al., Cell Mol Life Sci 54:1203 (1998); Knight, J. Interferon Res. 2:421 (1982); Runkel et al., Pharm Res 15:641 (1998); Lin, Dev. Biol. Stand. 96:97 (1998)). Interferon-γ contains two N-linked oligosaccharide chains at positions 25 and 97, both important for the efficient formation of the bioactive recombinant protein, and having an influence on the pharmacokinetic properties of the protein (Sareneva et al., Eur. J. Biochem 242:191 (1996); Sareneva et al., Biochem J. 303:831 (1994); Sareneva et al., J. Interferon Res. 13:267 (1993)). Mixed O-linked and N-linked glycosylation also occurs, for example in human erythropoietin, N-linked glycosylation occurs at asparagine residues located at positions 24, 38 and 83 while O-linked glycosylation occurs at a serine residue located at position 126 (Lai et al., J. Biol. Chem. 261:3116 (1986); Broudy et al., Arch. Biochem. Biophys. 265:329 (1988)).

[0044] Therapeutic proteins corresponding to a Therapeutic protein portion of an albumin fusion protein of the invention, as well as analogs and variants thereof, may be modified so that glycosylation at one or more sites is altered as a result of manipulation(s) of their nucleic acid sequence, by the host cell in which they are expressed, or due to other conditions of their expression. For example, glycosylation isomers may be produced by abolishing or introducing glycosylation sites, e.g., by substitution or deletion of amino acid residues, such as substitution of glutamine for asparagine, or unglycosylated recombinant proteins may be produced by expressing the proteins in host cells that will not glycosylate them, e.g. in E. coli or glycosylation-deficient yeast. These approaches are described in more detail below and are known in the art.

[0045] Therapeutic proteins (particularly those disclosed in Table 1) and their nucleic acid sequences are well known in the art and available in public databases such as Chemical Abstracts Services Databases (e.g., the CAS Registry), GenBank, and GenSeq as shown in Table 1.

[0046] Additional Therapeutic proteins corresponding to a Therapeutic protein portion of an albumin fusion protein of the invention include, but are not limited to, one or more of the Therapeutic proteins or peptides disclosed in the “Therapeutic Protein X” column of Table 1, or fragment or variable thereof.

[0047] Table 1 provides a non-exhaustive list of Therapeutic proteins that correspond to a Therapeutic protein portion of an albumin fusion protein of the invention. The “Therapeutic Protein X” column discloses Therapeutic protein molecules followed by parentheses containing scientific and brand names that comprise, or alternatively consist of, that Therapeutic protein molecule or a fragment or variant thereof. “Therapeutic protein X” as used herein may refer either to an individual Therapeutic protein molecule (as defined by the amino acid sequence obtainable from the CAS and Genbank accession numbers), or to the entire group of Therapeutic proteins associated with a given Therapeutic protein molecule disclosed in this column. The “Exemplary Identifier” column provides Chemical Abstracts Services (CAS) Registry Numbers (published by the American Chemical Society) and/or Genbank Accession Numbers ((e.g., Locus ID, NP_XXXXX (Reference Sequence Protein), and XP_XXXXX (Model Protein) identifiers available through the national Center for Biotechnology Information (NCBI) webpage at www.ncbi.nlm.nih.gov) that correspond to entries in the CAS Registry or Genbank database which contain an amino acid sequence of the Therapeutic Protein Molecule or of a fragment or variant of the Therapeutic Protein Molecule. In addition GenSeq Accession numbers and/or journal publication citations are given to identify the exemplary amino acid sequence for some polypeptides. The summary pages associated with each of these CAS and Genbank and GenSeq Accession Numbers as well as the cited journal publications (e.g., PubMed ID number (PMID)) are each incorporated by reference in their entireties, particularly with respect to the amino acid sequences described therein. The “PCT/Patent Reference” column provides U.S. patent numbers, or PCT International Publication Numbers corresponding to patents and/or published patent applications that describe the Therapeutic protein molecule. Each of the patents and/or published patent applications cited in the “PCT/Patent Reference” column are herein incorporated by reference in their entireties. In particular, the amino acid sequences of the specified polypeptide set forth in the sequence listing of each cited “PCT/Patent Reference”, the variants of these amino acid sequences (mutations, fragments, etc.) set forth, for example, in the detailed description of each cited “PCT/Patent Reference”, the therapeutic indications set forth, for example, in the detailed description of each cited “PCT/Patent Reference”, and the activity asssays for the specified polypeptide set forth in the detailed description, and more particularly, the examples of each cited “PCT/Patent Reference” are incorporated herein by reference. The “Biological activity” column describes Biological activities associated with the Therapeutic protein molecule. The “Exemplary Activity Assay” column provides references that describe assays which may be used to test the therapeutic and/or biological activity of a Therapeutic protein or an albumin fusion protein of the invention comprising a Therapeutic protein X portion. Each of the references cited in the “Exemplary Activity Assay” column are herein incorporated by reference in their entireties, particularly with respect to the description of the respective activity assay described in the reference (see Methods section, for example) for assaying the corresponding biological activity set forth in the “Biological Activity” column of Table 1. The “Preferred Indication Y” column describes disease, disorders, and/or conditions that may be treated, prevented, diagnosed, or ameliorated by Therapeutic protein X or an albumin fusion protein of the invention comprising a Therapeutic protein X portion.

[0048] The recitation of “Cancer” in the “Preferred Indication Y” column indicates that corresponding Therapeutic protein, fusion protein containing the Therapeutic protein, and fragments and variants thereof, may be used for example, to diagnose, treat, prevent, and/or ameliorate diseases and/or disorders relating to neoplastic diseases (e.g., leukemias, cancers, and/or as described below under “Hyperproliferative Disorders”).

[0049] In specific embodiments, a Therapeutic protein having a “Cancer” recitation in the “Preferred Indication” column of Table 1, an albumin fusion protein that comprises a Therapeutic protein portion corresponding to this Therapeutic protein, and fragments and variants thereof, may be used for example, to diagnose, treat, prevent, and/or ameliorate a neoplasm located in a tissue selected from the group consisting of: colon, abdomen, bone, breast, digestive system, liver, pancreas, prostate, peritoneum, lung, blood (e.g., leukemia), endocrine glands (adrenal, parathyroid, pituitary, testicles, ovary, thymus, thyroid), uterus, eye, head and neck, nervous (central and peripheral), lymphatic system, pelvic, skin, soft tissue, spleen, thoracic, and urogenital.

[0050] In specific embodiments, a Therapeutic protein having a “Cancer” recitation in the “Preferred Indication” column of Table 1, an albumin fusion protein that comprises a Therapeutic protein portion corresponding to this Therapeutic protein, and fragments and variants thereof, may be used for example, to diagnose, treat, prevent, and/or ameliorate a pre-neoplastic condition, selected from the group consisting of: hyperplasia (e.g., endometrial hyperplasia and/or as described in the section entitled “Hyperproliferative Disorders”), metaplasia (e.g., connective tissue metaplasia, atypical metaplasia, and/or as described in the section entitled “Hyperproliferative Disorders”), and/or dysplasia (e.g., cervical dysplasia, and bronchopulmonary dysplasia).

[0051] In another specific embodiment, a Therapeutic protein having a “Cancer” recitation in the “Preferred Indication” column of Table 1, an albumin fusion protein that comprises a Therapeutic protein portion corresponding to this Therapeutic protein, and fragments and variants thereof, may be used for example, to diagnose, treat, prevent, and/or ameliorate a benign dysproliferative disorder selected from the group consisting of: benign tumors, fibrocystic conditions, tissue hypertrophy, and/or as described in the section entitled “Hyperproliferative Disorders”.

[0052] The recitation of “Immune/Hematopoietic” in the “Preferred Indication Y” column indicates that corresponding Therapeutic protein, fusion protein containing the Therapeutic protein, and fragments and variants thereof, may be used for example, to diagnose, treat, prevent, and/or ameliorate diseases and/or disorders relating to neoplastic diseases (e.g., as described below under “Hyperproliferative Disorders”), blood disorders (e.g., as described below under “Immune Activity” “Cardiovascular Disorders” and/or “Blood-Related Disorders”), and infections (e.g., as described below under “Infectious Disease”).

[0053] In specific embodiments, a Therapeutic protein having a “Immune/Hematopoietic” recitation in the “Preferred Indication” column of Table 1, a fusion protein containing this Therapeutic protein, and fragments and variants thereof, may be used for example, to diagnose, treat, prevent, and/or ameliorate a disease or disorder selected from the group consisting of: anemia, pancytopenia, leukopenia, thrombocytopenia, leukemias, Hodgkin's disease, non-Hodgkin's lymphoma, acute lymphocytic anemia (ALL), plasmacytomas, multiple myeloma, Burkitt's lymphoma, arthritis, asthma, AIDS, autoimmune disease, rheumatoid arthritis, granulomatous disease, immune deficiency, inflammatory bowel disease, sepsis, neutropenia, neutrophilia, psoriasis, immune reactions to transplanted organs and tissues, systemic lupus erythematosis, hemophilia, hypercoagulation, diabetes mellitus, endocarditis, meningitis, Lyme Disease, and allergies.

[0054] The recitation of “Reproductive” in the “Preferred Indication Y” column indicates that corresponding Therapeutic protein, fusion protein containing the Therapeutic protein, and fragments and variants thereof, may be used for example, to diagnose, treat, prevent, and/or ameliorate diseases and/or disorders relating to neoplastic diseases (e.g., as described below under “Hyperproliferative Disorders”), and disorders of the reproductive system (e.g., as described below under “Reproductive System Disorders”).

[0055] In specific embodiments, a Therapeutic protein having a “Reproductive” recitation in the “Preferred Indication” column of Table 1, a fusion protein containing this Therapeutic protein, and fragments and variants thereof, may be used for example, to diagnose, treat, prevent, and/or ameliorate a disease or disorder selected from the group consisting of: cryptorchism, prostatitis, inguinal hernia, varicocele, leydig cell tumors, verrucous carcinoma, prostatitis, malacoplakia, Peyronie's disease, penile carcinoma, squamous cell hyperplasia, dysmenorrhea, ovarian adenocarcinoma, Turner's syndrome, mucopurulent cervicitis, Sertoli-leydig tumors, ovarian cancer, uterine cancer, pelvic inflammatory disease, testicular cancer, prostate cancer, Klinefelter's syndrome, Young's syndrome, premature ejaculation, diabetes mellitus, cystic fibrosis, Kartagener's syndrome, testicular atrophy, testicular feminization, anorchia, ectopic testis, epididymitis, orchitis, gonorrhea, syphilis, testicular torsion, vasitis nodosa, germ cell tumors, stromal tumors, dysmenorrhea, retroverted uterus, endometriosis, fibroids, adenomyosis, anovulatory bleeding, amenorrhea, Cushing's syndrome, hydatidiform moles, Asherman's syndrome, premature menopause, precocious puberty, uterine polyps, dysfunctional uterine bleeding, cervicitis, chronic cervicitis, mucopurulent cervicitis, cervical dysplasia, cervical polyps, Nabothian cysts, cervical erosion, cervical incompetence, cervical neoplasms, pseudohermaphroditism, and premenstrual syndrome.

[0056] The recitation of “Musculoskeletal” in the “Preferred Indication Y” column indicates that corresponding Therapeutic protein, fusion protein containing the Therapeutic protein, and fragments and variants thereof, may be used for example, to diagnose, treat, prevent, and/or ameliorate diseases and/or disorders relating to neoplastic diseases (e.g., as described below under “Hyperproliferative Disorders”), and disorders of the immune system (e.g., as described below under “Immune Activity”).

[0057] In specific embodiments, a Therapeutic protein having a “Musculoskeletal” recitation in the “Preferred Indication” column of Table 1, a fusion protein containing this Therapeutic protein, and fragments and variants thereof, may be used for example, to diagnose, treat, prevent, and/or ameliorate a disease or disorder selected from the group consisting of: bone cancers (e.g., osteochondromas, benign chondromas, chondroblastoma, chondromyxoid fibromas, osteoid osteomas, giant cell tumors, multiple myeloma, osteosarcomas), Paget's Disease, rheumatoid arthritis, systemic lupus erythematosus, osteomyelitis, Lyme Disease, gout, bursitis, tendonitis, osteoporosis, osteoarthritis, muscular dystrophy, mitochondrial myopathy, cachexia, and multiple sclerosis.

[0058] The recitation of “Cardiovascular” in the “Preferred Indication Y” column indicates that corresponding Therapeutic protein, fusion protein containing the Therapeutic protein, and fragments and variants thereof, may be used for example, to diagnose, treat, prevent, and/or ameliorate diseases and/or disorders relating to neoplastic diseases (e.g., as described below under “Hyperproliferative Disorders”), and disorders of the cardiovascular system (e.g., as described below under “Cardiovascular Disorders”).

[0059] In specific embodiments, a Therapeutic protein having a “Cardiovascular” recitation in the “Preferred Indication” column of Table 1, a fusion protein containing this Therapeutic protein, and fragments and variants thereof, may be used for example, to diagnose, treat, prevent, and/or ameliorate a disease or disorder selected from the group consisting of: myxomas, fibromas, rhabdomyomas, cardiovascular abnormalities (e.g., congenital heart defects, cerebral arteriovenous malformations, septal defects), heart disease (e.g., heart failure, congestive heart disease, arrhythmia, tachycardia, fibrillation, pericardial Disease, endocarditis), cardiac arrest, heart valve disease (e.g., stenosis, regurgitation, prolapse), vascular disease (e.g., hypertension, coronary artery disease, angina, aneurysm, arteriosclerosis, peripheral vascular disease), hyponatremia, hypematremia, hypokalemia, and hyperkalemia.

[0060] The recitation of “Mixed Fetal” in the “Preferred Indication Y” column indicates that corresponding Therapeutic protein, fusion protein containing the Therapeutic protein, and fragments and variants thereof, may be used for example, to diagnose, treat, prevent, and/or ameliorate diseases and/or disorders relating to neoplastic diseases (e.g., as described below under “Hyperproliferative Disorders”).

[0061] In specific embodiments, a Therapeutic protein having a “Mixed Fetal” recitation in the “Preferred Indication” column of Table 1, an albumin fusion protein that comprises a Therapeutic protein portion corresponding to this Therapeutic protein, and fragments and variants thereof, may be used for example, to diagnose, treat, prevent, and/or ameliorate a disease or disorder selected from the group consisting of: spina bifida, hydranencephaly, neurofibromatosis, fetal alcohol syndrome, diabetes mellitus, PKU, Down's syndrome, Patau syndrome, Edwards syndrome, Turner syndrome, Apert syndrome, Carpenter syndrome, Conradi syndrome, Crouzon syndrome, cutis laxa, Cornelia de Lange syndrome, Ellis-van Creveld syndrome, Holt-Oram syndrome, Kartagener syndrome, Meckel-Gruber syndrome, Noonan syndrome, Pallister-Hall syndrome, Rubinstein-Taybi syndrome, Scimitar syndrome, Smith-Lemli-Opitz syndrome, thromocytopenia-absent radius (TAR) syndrome, Treacher Collins syndrome, Williams syndrome, Hirschsprung's disease, Meckel's diverticulum, polycystic kidney disease, Turner's syndrome, and gonadal dysgenesis, Klippel-Feil syndrome, Ostogenesis imperfecta, muscular dystrophy, Tay-Sachs disease, Wilm's tumor, neuroblastoma, and retinoblastoma.

[0062] The recitation of “Excretory” in the “Preferred Indication Y” column indicates that corresponding Therapeutic protein, fusion protein containing the Therapeutic protein, and fragments and variants thereof, may be used for example, to diagnose, treat, prevent, and/or ameliorate diseases and/or disorders relating to neoplastic diseases (e.g., as described below under “Hyperproliferative Disorders”) and renal disorders (e.g., as described below under “Renal Disorders”).

[0063] In specific embodiments, a Therapeutic protein having a “Excretory” recitation in the “Preferred Indication” column of Table 1, an albumin fusion protein that comprises a Therapeutic protein portion corresponding to this Therapeutic protein, and fragments and variants thereof, may be used for example, to diagnose, treat, prevent, and/or ameliorate a disease or disorder selected from the group consisting of: bladder cancer, prostate cancer, benign prostatic hyperplasia, bladder disorders (e.g., urinary incontinence, urinary retention, urinary obstruction, urinary tract Infections, interstitial cystitis, prostatitis, neurogenic bladder, hematuria), renal disorders (e.g., hydronephrosis, proteinuria, renal failure, pyelonephritis, urolithiasis, reflux nephropathy, and unilateral obstructive uropathy).

[0064] The recitation of “Neural/Sensory” in the “Preferred Indication Y” column indicates that corresponding Therapeutic protein, fusion protein containing the Therapeutic protein, and fragments and variants thereof, may be used for example, to diagnose, treat, prevent, and/or ameliorate diseases and/or disorders relating to neoplastic diseases (e.g., as described below under “Hyperproliferative Disorders”) and diseases or disorders of the nervous system (e.g., as described below under “Neural Activity and Neurological Diseases”).

[0065] In specific embodiments, a Therapeutic protein having a “Neural/Sensory” recitation in the “Preferred Indication” column of Table 1, an albumin fusion protein that comprises a Therapeutic protein portion corresponding to this Therapeutic protein, and fragments and variants thereof, may be used for example, to diagnose, treat, prevent, and/or ameliorate a disease or disorder selected from the group consisting of: brain cancer (e.g., brain stem glioma, brain tumors, central nervous system (Primary) lymphoma, central nervous system lymphoma, cerebellar astrocytoma, and cerebral astrocytoma, neurodegenerative disorders (e.g., Alzheimer's Disease, Creutzfeldt-Jakob Disease, Parkinson's Disease, and Idiopathic Presenile Dementia), encephalomyelitis, cerebral malaria, meningitis, metabolic brain diseases (e.g., phenylketonuria and pyruvate carboxylase deficiency), cerebellar ataxia, ataxia telangiectasia, and AIDS Dementia Complex, schizophrenia, attention deficit disorder, hyperactive attention deficit disorder, autism, and obsessive compulsive disorders.

[0066] The recitation of “Respiratory” in the “Preferred Indication Y” column indicates that corresponding Therapeutic protein, fusion protein containing the Therapeutic protein, and fragments and variants thereof, may be used for example, to diagnose, treat, prevent, and/or ameliorate diseases and/or disorders relating to neoplastic diseases (e.g., as described below under “Hyperproliferative Disorders”) and diseases or disorders of the respiratory system (e.g., as described below under “Respiratory Disorders”).

[0067] In specific embodiments, a Therapeutic protein having a “Respiratory” recitation in the “Preferred Indication” column of Table 1, an albumin fusion protein that comprises a Therapeutic protein portion corresponding to this Therapeutic protein, and fragments and variants thereof, may be used for example, to diagnose, treat, prevent, and/or ameliorate a disease or disorder selected from the group consisting of: cancers of the respiratory system such as larynx cancer, pharynx cancer, trachea cancer, epiglottis cancer, lung cancer, squamous cell carcinomas, small cell (oat cell) carcinomas, large cell carcinomas, and adenocarcinomas. Allergic reactions, cystic fibrosis, sarcoidosis, histiocytosis X, infiltrative lung diseases (e.g., pulmonary fibrosis and lymphoid interstitial pneumonia), obstructive airway diseases (e.g., asthma, emphysema, chronic or acute bronchitis), occupational lung diseases (e.g., silicosis and asbestosis), pneumonia, and pleurisy.

[0068] The recitation of “Endocrine” in the “Preferred Indication Y” column indicates that corresponding Therapeutic protein, fusion protein containing the Therapeutic protein, and fragments and variants thereof, may be used for example, to diagnose, treat, prevent, and/or ameliorate diseases and/or disorders relating to neoplastic diseases (e.g., as described below under “Hyperproliferative Disorders”) and diseases or disorders of the respiratory system (e.g., as described below under “Respiratory Disorders”), renal disorders (e.g., as described below under “Renal Disorders”), and disorders of the endocrine system (e.g., as described below under “Endocrine Disorders”.

[0069] In specific embodiments, a Therapeutic protein having a “Endocrine” recitation in the “Preferred Indication” column of Table 1, an albumin fusion protein that comprises a Therapeutic protein portion corresponding to this Therapeutic protein, and fragments and variants thereof, may be used for example, to diagnose, treat, prevent, and/or ameliorate a disease or disorder selected from the group consisting of: cancers of endocrine tissues and organs (e.g., cancers of the hypothalamus, pituitary gland, thyroid gland, parathyroid glands, pancreas, adrenal glands, ovaries, and testes), diabetes (e.g., diabetes insipidus, type I and type II diabetes mellitus), obesity, disorders related to pituitary glands (e.g., hyperpituitarism, hypopituitarism, and pituitary dwarfism), hypothyroidism, hyperthyroidism, goiter, reproductive disorders (e.g. male and female infertility), disorders related to adrenal glands (e.g., Addison's Disease, corticosteroid deficiency, and Cushing's Syndrome), kidney cancer (e.g., hypernephroma, transitional cell cancer, and Wilm's tumor), diabetic nephropathy, interstitial nephritis, polycystic kidney disease, glomerulonephritis (e.g., IgM mesangial proliferative glomerulonephritis and glomerulonephritis caused by autoimmune disorders; such as Goodpasture's syndrome), and nephrocalcinosis.

[0070] The recitation of “Digestive” in the “Preferred Indication Y” column indicates that corresponding Therapeutic protein, fusion protein containing the Therapeutic protein, and fragments and variants thereof, may be used for example, to diagnose, treat, prevent, and/or ameliorate diseases and/or disorders relating to neoplastic diseases (e.g., as described below under “Hyperproliferative Disorders”) and diseases or disorders of the gastrointestinal system (e.g., as described below under “Gastrointestinal Disorders”.

[0071] In specific embodiments, a Therapeutic protein having a “Digestive” recitation in the “Preferred Indication” column of Table 1, an albumin fusion protein that comprises a Therapeutic protein portion corresponding to this Therapeutic protein, and fragments and variants thereof, may be used for example, to diagnose, treat, prevent, and/or ameliorate a disease or disorder selected from the group consisting of: ulcerative colitis, appendicitis, Crohn's disease, hepatitis, hepatic encephalopathy, portal hypertension, cholelithiasis, cancer of the digestive system (e.g., biliary tract cancer, stomach cancer, colon cancer, gastric cancer, pancreatic cancer, cancer of the bile duct, tumors of the colon (e.g., polyps or cancers), and cirrhosis), pancreatitis, ulcerative disease, pyloric stenosis, gastroenteritis, gastritis, gastric atropy, benign tumors of the duodenum, distension, irritable bowel syndrome, malabsorption, congenital disorders of the small intestine, bacterial and parasitic infection, megacolon, Hirschsprung's disease, aganglionic megacolon, acquired megacolon, colitis, anorectal disorders (e.g., anal fistulas, hemorrhoids), congenital disorders of the liver (e.g., Wilson's disease, hemochromatosis, cystic fibrosis, biliary atresia, and alpha1-antitrypsin deficiency), portal hypertension, cholelithiasis, and jaundice.

[0072] The recitation of “Connective/Epithelial” in the “Preferred Indication Y” column indicates that corresponding Therapeutic protein, fusion protein containing the Therapeutic protein, and fragments and variants thereof, may be used for example, to diagnose, treat, prevent, and/or ameliorate diseases and/or disorders relating to neoplastic diseases (e.g., as described below under “Hyperproliferative Disorders”), cellular and genetic abnormalities (e.g., as described below under “Diseases at the Cellular Level”), angiogenesis (e.g., as described below under “Anti-Angiogenesis Activity”), and or to promote or inhibit regeneration (e.g., as described below under “Regeneration”), and wound healing (e.g., as described below under “Wound Healing and Epithelial Cell Proliferation”).

[0073] In specific embodiments, a Therapeutic protein having a “Connective/Epithelial” recitation in the “Preferred Indication” column of Table 1, an albumin fusion protein that comprises a Therapeutic protein portion corresponding to this Therapeutic protein, and fragments and variants thereof, may be used for example, to diagnose, treat, prevent, and/or ameliorate a disease or disorder selected from the group consisting of: connective tissue metaplasia, mixed connective tissue disease, focal epithelial hyperplasia, epithelial metaplasia, mucoepithelial dysplasia, graft v. host disease, polymyositis, cystic hyperplasia, cerebral dysplasia, tissue hypertrophy, Alzheimer's disease, lymphoproliferative disorder, Waldenstron's macroglobulinemia, Crohn's disease, pernicious anemia, idiopathic Addison's disease, glomerulonephritis, bullous pemphigoid, Sjogren's syndrome, diabetes mellitus, cystic fibrosis, osteoblastoma, osteoclastoma, osteosarcoma, chondrosarcoma, osteoporosis, osteocarthritis, periodontal disease, wound healing, relapsing polychondritis, vasculitis, polyarteritis nodosa, Wegener's granulomatosis, cellulitis, rheumatoid arthritis, psoriatic arthritis, discoid lupus erythematosus, systemic lupus erythematosus, scleroderma, CREST syndrome, Sjogren's syndrome, polymyositis, dermatomyositis, mixed connective tissue disease, relapsing polychondritis, vasculitis, Henoch-Schonlein syndrome, erythema nodosum, polyarteritis nodosa, temporal (giant cell) arteritis, Takayasu's arteritis, Wegener's granulomatosis, Reiter's syndrome, Behcet's syndrome, ankylosing spondylitis, cellulitis, keloids, Ehler Danlos syndrome, Marfan syndrome, pseudoxantoma elasticum, osteogenese imperfecta, chondrodysplasias, epidermolysis bullosa, Alport syndrome, and cutis laxa.

Lengthy table referenced here
US20100286048A1-20101111-T00001
Please refer to the end of the specification for access instructions.

[0074] In preferred embodiments, the albumin fusion proteins of the invention are capable of a therapeutic activity and/or biologic activity corresponding to the therapeutic activity and/or biologic activity of the Therapeutic protein corresponding to the Therapeutic protein portion of the albumin fusion protein listed in the corresponding row of Table 1. In further preferred embodiments, the therapeutically active protein portions of the albumin fusion proteins of the invention are fragments or variants of the reference sequence cited in the “Exemplary Identifier” column of Table 1, and are capable of the therapeutic activity and/or biologic activity of the corresponding Therapeutic protein.

[0075] Polypeptide and Polynucleotide Fragments and Variants

[0076] Fragments

[0077] The present invention is further directed to fragments of the Therapeutic proteins described in Table 1, albumin proteins, and/or albumin fusion proteins of the invention.

[0078] Even if deletion of one or more amino acids from the N-terminus of a protein results in modification or loss of one or more biological functions of the Therapeutic protein, albumin protein, and/or albumin fusion protein, other Therapeutic activities and/or functional activities (e.g., biological activities, ability to multimerize, ability to bind a ligand) may still be retained. For example, the ability of polypeptides with N-terminal deletions to induce and/or bind to antibodies which recognize the complete or mature forms of the polypeptides generally will be retained when less than the majority of the residues of the complete polypeptide are removed from the N-terminus. Whether a particular polypeptide lacking N-terminal residues of a complete polypeptide retains such immunologic activities can readily be determined by routine methods described herein and otherwise known in the art. It is not unlikely that a mutein with a large number of deleted N-terminal amino acid residues may retain some biological or immunogenic activities. In fact, peptides composed of as few as six amino acid residues may often evoke an immune response.

[0079] Accordingly, fragments of a Therapeutic protein corresponding to a Therapeutic protein portion of an albumin fusion protein of the invention, include the full length protein as well as polypeptides having one or more residues deleted from the amino terminus of the amino acid sequence of the reference polypeptide (i.e., a Therapeutic protein as disclosed in Table 1). In particular, N-terminal deletions may be described by the general formula m-q, where q is a whole integer representing the total number of amino acid residues in a reference polypeptide (e.g., a Therapeutic protein referred to in Table 1), and m is defined as any integer ranging from 2 to q-6. Polynucleotides encoding these polypeptides are also encompassed by the invention.

[0080] In addition, fragments of serum albumin polypeptides corresponding to an albumin protein portion of an albumin fusion protein of the invention, include the full length protein as well as polypeptides having one or more residues deleted from the amino terminus of the amino acid sequence of the reference polypeptide (i.e., serum albumin). In particular, N-terminal deletions may be described by the general formula m-585, where 585 is a whole integer representing the total number of amino acid residues in serum albumin (SEQ ID NO:18), and m is defined as any integer ranging from 2 to 579. Polynucleotides encoding these polypeptides are also encompassed by the invention.

[0081] Moreover, fragments of albumin fusion proteins of the invention, include the full length albumin fusion protein as well as polypeptides having one or more residues deleted from the amino terminus of the albumin fusion protein. In particular, N-terminal deletions may be described by the general formula m-q, where q is a whole integer representing the total number of amino acid residues in the albumin fusion protein, and m is defined as any integer ranging from 2 to q-6. Polynucleotides encoding these polypeptides are also encompassed by the invention.

[0082] Also as mentioned above, even if deletion of one or more amino acids from the N-terminus or C-terminus of a reference polypeptide (e.g., a Therapeutic protein and/or serum albumin protein) results in modification or loss of one or more biological functions of the protein, other functional activities (e.g., biological activities, ability to multimerize, ability to bind a ligand) and/or Therapeutic activities may still be retained. For example the ability of polypeptides with C-terminal deletions to induce and/or bind to antibodies which recognize the complete or mature forms of the polypeptide generally will be retained when less than the majority of the residues of the complete or mature polypeptide are removed from the C-terminus. Whether a particular polypeptide lacking the N-terminal and/or C-terminal residues of a reference polypeptide retains Therapeutic activity can readily be determined by routine methods described herein and/or otherwise known in the art.

[0083] The present invention further provides polypeptides having one or more residues deleted from the carboxy terminus of the amino acid sequence of a Therapeutic protein corresponding to a Therapeutic protein portion of an albumin fusion protein of the invention (e.g., a Therapeutic protein referred to in Table 1). In particular, C-terminal deletions may be described by the general formula 1-n, where n is any whole integer ranging from 6 to q-1, and where q is a whole integer representing the total number of amino acid residues in a reference polypeptide (e.g., a Therapeutic protein referred to in Table 1). Polynucleotides encoding these polypeptides are also encompassed by the invention.

[0084] In addition, the present invention provides polypeptides having one or more residues deleted from the carboxy terminus of the amino acid sequence of an albumin protein corresponding to an albumin protein portion of an albumin fusion protein of the invention (e.g., serum albumin). In particular, C-terminal deletions may be described by the general formula 1-n, where n is any whole integer ranging from 6 to 584, where 584 is the whole integer representing the total number of amino acid residues in serum albumin (SEQ ID NO:18) minus 1. Polynucleotides encoding these polypeptides are also encompassed by the invention.

[0085] Moreover, the present invention provides polypeptides having one or more residues deleted from the carboxy terminus of an albumin fusion protein of the invention. In particular, C-terminal deletions may be described by the general formula 1-n, where n is any whole integer ranging from 6 to q-1, and where q is a whole integer representing the total number of amino acid residues in an albumin fusion protein of the invention. Polynucleotides encoding these polypeptides are also encompassed by the invention.

[0086] In addition, any of the above described N- or C-terminal deletions can be combined to produce a N- and C-terminal deleted reference polypeptide. The invention also provides polypeptides having one or more amino acids deleted from both the amino and the carboxyl termini, which may be described generally as having residues m-n of a reference polypeptide (e.g., a Therapeutic protein referred to in Table 1, or serum albumin (e.g., SEQ ID NO:18), or an albumin fusion protein of the invention) where n and m are integers as described above. Polynucleotides encoding these polypeptides are also encompassed by the invention.

[0087] The present application is also directed to proteins containing polypeptides at least 80%, 85%, 90%, 95%, 96%, 97%, 98% or 99% identical to a reference polypeptide sequence (e.g., a Therapeutic protein, serum albumin protein or an albumin fusion protein of the invention) set forth herein, or fragments thereof. In preferred embodiments, the application is directed to proteins comprising polypeptides at least 80%, 85%, 90%, 95%, 96%, 97%, 98% or 99% identical to reference polypeptides having the amino acid sequence of N- and C-terminal deletions as described above. Polynucleotides encoding these polypeptides are also encompassed by the invention.

[0088] Preferred polypeptide fragments of the invention are fragments comprising, or alternatively, consisting of, an amino acid sequence that displays a Therapeutic activity and/or functional activity (e.g. biological activity) of the polypeptide sequence of the Therapeutic protein or serum albumin protein of which the amino acid sequence is a fragment.

Other preferred polypeptide fragments are biologically active fragments. Biologically active fragments are those exhibiting activity similar, but not necessarily identical, to an activity of the polypeptide of the present invention. The biological activity of the fragments may include an improved desired activity, or a decreased undesirable activity.

[0089] Variants

[0090] “Variant” refers to a polynucleotide or nucleic acid differing from a reference nucleic acid or polypeptide, but retaining essential properties thereof. Generally, variants are overall closely similar, and, in many regions, identical to the reference nucleic acid or polypeptide.

[0091] As used herein, “variant”, refers to a Therapeutic protein portion of an albumin fusion protein of the invention, albumin portion of an albumin fusion protein of the invention, or albumin fusion protein differing in sequence from a Therapeutic protein (e.g. see “therapeutic” column of Table 1), albumin protein, and/or albumin fusion protein of the invention, respectively, but retaining at least one functional and/or therapeutic property thereof as described elsewhere herein or otherwise known in the art. Generally, variants are overall very similar, and, in many regions, identical to the amino acid sequence of the Therapeutic protein corresponding to a Therapeutic protein portion of an albumin fusion protein of the invention, albumin protein corresponding to an albumin protein portion of an albumin fusion protein of the invention, and/or albumin fusion protein of the invention. Nucleic acids encoding these variants are also encompassed by the invention.

[0092] The present invention is also directed to proteins which comprise, or alternatively consist of, an amino acid sequence which is at least 80%, 85%, 90%, 95%, 96%, 97%, 98%, 99% or 100%, identical to, for example, the amino acid sequence of a Therapeutic protein corresponding to a Therapeutic protein portion of an albumin fusion protein of the invention (e.g., an amino acid sequence disclosed in the “Exemplary Identifier” column of Table 1, or fragments or variants thereof), albumin proteins (e.g., SEQ ID NO:18 or fragments or variants thereof) corresponding to an albumin protein portion of an albumin fusion protein of the invention, and/or albumin fusion proteins of the invention. Fragments of these polypeptides are also provided (e.g., those fragments described herein). Further polypeptides encompassed by the invention are polypeptides encoded by polynucleotides which hybridize to the complement of a nucleic acid molecule encoding an amino acid sequence of the invention under stringent hybridization conditions (e.g., hybridization to filter bound DNA in 6× Sodium chloride/Sodium citrate (SSC) at about 45 degrees Celsius, followed by one or more washes in 0.2×SSC, 0.1% SDS at about 50-65 degrees Celsius), under highly stringent conditions (e.g., hybridization to filter bound DNA in 6× sodium chloride/Sodium citrate (SSC) at about 45 degrees Celsius, followed by one or more washes in 0.1×SSC, 0.2% SDS at about 68 degrees Celsius), or under other stringent hybridization conditions which are known to those of skill in the art (see, for example, Ausubel, F. M. et al., eds., 1989 Current protocol in Molecular Biology, Green publishing associates, Inc., and John Wiley & Sons Inc., New York, at pages 6.3.1-6.3.6 and 2.10.3). Polynucleotides encoding these polypeptides are also encompassed by the invention.

[0093] By a polypeptide having an amino acid sequence at least, for example, 95% “identical” to a query amino acid sequence of the present invention, it is intended that the amino acid sequence of the subject polypeptide is identical to the query sequence except that the subject polypeptide sequence may include up to five amino acid alterations per each 100 amino acids of the query amino acid sequence. In other words, to obtain a polypeptide having an amino acid sequence at least 95% identical to a query amino acid sequence, up to 5% of the amino acid residues in the subject sequence may be inserted, deleted, or substituted with another amino acid. These alterations of the reference sequence may occur at the amino- or carboxy-terminal positions of the reference amino acid sequence or anywhere between those terminal positions, interspersed either individually among residues in the reference sequence or in one or more contiguous groups within the reference sequence.

[0094] As a practical matter, whether any particular polypeptide is at least 80%, 85%, 90%, 95%, 96%, 97%, 98% or 99% identical to, for instance, the amino acid sequence of an albumin fusion protein of the invention or a fragment thereof (such as the Therapeutic protein portion of the albumin fusion protein or the albumin portion of the albumin fusion protein), can be determined conventionally using known computer programs. A preferred method for determining the best overall match between a query sequence (a sequence of the present invention) and a subject sequence, also referred to as a global sequence alignment, can be determined using the FASTDB computer program based on the algorithm of Brutlag et al. (Comp. App. Biosci. 6:237-245 (1990)). In a sequence alignment the query and subject sequences are either both nucleotide sequences or both amino acid sequences. The result of said global sequence alignment is expressed as percent identity. Preferred parameters used in a FASTDB amino acid alignment are: Matrix=PAM 0, k-tuple=2, Mismatch Penalty=1, Joining Penalty=20, Randomization Group Length=0, Cutoff Score=1, Window Size=sequence length, Gap Penalty=5, Gap Size Penalty=0.05, Window Size=500 or the length of the subject amino acid sequence, whichever is shorter.

[0095] If the subject sequence is shorter than the query sequence due to N- or C-terminal deletions, not because of internal deletions, a manual correction must be made to the results. This is because the FASTDB program does not account for N- and C-terminal truncations of the subject sequence when calculating global percent identity. For subject sequences truncated at the N- and C-termini, relative to the query sequence, the percent identity is corrected by calculating the number of residues of the query sequence that are N- and C-terminal of the subject sequence, which are not matched/aligned with a corresponding subject residue, as a percent of the total bases of the query sequence. Whether a residue is matched/aligned is determined by results of the FASTDB sequence alignment. This percentage is then subtracted from the percent identity, calculated by the above FASTDB program using the specified parameters, to arrive at a final percent identity score. This final percent identity score is what is used for the purposes of the present invention. Only residues to the N- and C-termini of the subject sequence, which are not matched/aligned with the query sequence, are considered for the purposes of manually adjusting the percent identity score. That is, only query residue positions outside the farthest N- and C-terminal residues of the subject sequence.

[0096] For example, a 90 amino acid residue subject sequence is aligned with a 100 residue query sequence to determine percent identity. The deletion occurs at the N-terminus of the subject sequence and therefore, the FASTDB alignment does not show a matching/alignment of the first 10 residues at the N-terminus. The 10 unpaired residues represent 10% of the sequence (number of residues at the N- and C-termini not matched/total number of residues in the query sequence) so 10% is subtracted from the percent identity score calculated by the FASTDB program. If the remaining 90 residues were perfectly matched the final percent identity would be 90%. In another example, a 90 residue subject sequence is compared with a 100 residue query sequence. This time the deletions are internal deletions so there are no residues at the N- or C-termini of the subject sequence which are not matched/aligned with the query. In this case the percent identity calculated by FASTDB is not manually corrected. Once again, only residue positions outside the N- and C-terminal ends of the subject sequence, as displayed in the FASTDB alignment, which are not matched/aligned with the query sequence are manually corrected for. No other manual corrections are to made for the purposes of the present invention.

[0097] The variant will usually have at least 75% (preferably at least about 80%, 90%, 95% or 99%) sequence identity with a length of normal HA or Therapeutic protein which is the same length as the variant. Homology or identity at the nucleotide or amino acid sequence level is determined by BLAST (Basic Local Alignment Search Tool) analysis using the algorithm employed by the programs blastp, blastn, blastx, tblastn and tblastx (Karlin et al., Proc. Natl. Acad. Sci. USA 87: 2264-2268 (1990) and Altschul, J. Mol. Evol. 36: 290-300 (1993), fully incorporated by reference) which are tailored for sequence similarity searching.

[0098] The approach used by the BLAST program is to first consider similar segments between a query sequence and a database sequence, then to evaluate the statistical significance of all matches that are identified and finally to summarize only those matches which satisfy a preselected threshold of significance. For a discussion of basic issues in similarity searching of sequence databases, see Altschul et al., (Nature Genetics 6: 119-129 (1994)) which is fully incorporated by reference. The search parameters for histogram, descriptions, alignments, expect (i.e., the statistical significance threshold for reporting matches against database sequences), cutoff, matrix and filter are at the default settings. The default scoring matrix used by blastp, blastx, tblastn, and tblastx is the BLOSUM62 matrix (Henikoff et al., Proc. Natl. Acad. Sci. USA 89: 10915-10919 (1992), fully incorporated by reference). For blastn, the scoring matrix is set by the ratios of M (i.e., the reward score for a pair of matching residues) to N (i.e., the penalty score for mismatching residues), wherein the default values for M and N are 5 and −4, respectively. Four blastn parameters may be adjusted as follows: Q=10 (gap creation penalty); R=10 (gap extension penalty); wink=1 (generates word hits at every wine^{th} position along the query); and gapw=16 (sets the window width within which gapped alignments are generated). The equivalent Blastp parameter settings were Q=9; R=2; wink=1; and gapw=32. A Bestfit comparison between sequences, available in the GCG package version 10.0, uses DNA parameters GAP=50 (gap creation penalty) and LEN=3 (gap extension penalty) and the equivalent settings in protein comparisons are GAP=8 and LEN=2.

[0099] The polynucleotide variants of the invention may contain alterations in the coding regions, non-coding regions, or both. Especially preferred are polynucleotide variants containing alterations which produce silent substitutions, additions, or deletions, but do not alter the properties or activities of the encoded polypeptide. Nucleotide variants produced by silent substitutions due to the degeneracy of the genetic code are preferred. Moreover, polypeptide variants in which less than 50, less than 40, less than 30, less than 20, less than 10, or 5-50, 5-25, 5-10, 1-5, or 1-2 amino acids are substituted, deleted, or added in any combination are also preferred. Polynucleotide variants can be produced for a variety of reasons, e.g., to optimize codon expression for a particular host (change codons in the human mRNA to those preferred by a bacterial host, such as, yeast or E. coli).

[0100] In a preferred embodiment, a polynucleotide encoding an albumin portion of an albumin fusion protein of the invention is optimized for expression in yeast or mammalian cells. In further preferred embodiment, a polynucleotide encoding a Therapeutic protein portion of an albumin fusion protein of the invention is optimized for expression in yeast or mammalian cells. In a still further preferred embodiment, a polynucleotide encoding an albumin fusion protein of the invention is optimized for expression in yeast or mammalian cells.

[0101] In an alternative embodiment, a codon optimized polynucleotide encoding a Therapeutic protein portion of an albumin fusion protein of the invention does not hybridize to the wild type polynucleotide encoding the Therapeutic protein under stringent hybridization conditions as described herein. In a further embodiment, a codon optimized polynucleotide encoding an albumin portion of an albumin fusion protein of the invention do not hybridize to the wild type polynucleotide encoding the albumin protein under stringent hybridization conditions as described herein. In another embodiment, a codon optimized polynucleotide encoding an albumin fusion protein of the invention do not hybridize to the wild type polynucleotide encoding the Therapeutic protein portin or the albumin protein portion under stringent hybridization conditions as described herein.

[0102] In an additional embodiment, polynucleotides encoding a Therapeutic protein portion of an albumin fusion protein of the invention do not comprise, or alternatively consist of, the naturally occurring sequence of that Therapeutic protein. In a further embodiment, polynucleotides encoding an albumin protein portion of an albumin fusion protein of the invention do not comprise, or alternatively consist of, the naturally occurring sequence of albumin protein. In an alternative embodiment, polynucleotides encoding an albumin fusion protein of the invention do not comprise, or alternatively consist of, the naturally occurring sequence of a Therapeutic protein portion or the albumin protein portion.

[0103] Naturally occurring variants are called “allelic variants,” and refer to one of several alternate forms of a gene occupying a given locus on a chromosome of an organism. (Genes II, Lewin, B., ed., John Wiley & Sons, New York (1985)). These allelic variants can vary at either the polynucleotide and/or polypeptide level and are included in the present invention. Alternatively, non-naturally occurring variants may be produced by mutagenesis techniques or by direct synthesis.

[0104] Using known methods of protein engineering and recombinant DNA technology, variants may be generated to improve or alter the characteristics of the polypeptides of the present invention. For instance, one or more amino acids can be deleted from the N-terminus or C-terminus of the polypeptide of the present invention without substantial loss of biological function. As an example, Ron et al. (J. Biol. Chem. 268: 2984-2988 (1993)) reported variant KGF proteins having heparin binding activity even after deleting 3, 8, or 27 amino-terminal amino acid residues. Similarly, Interferon gamma exhibited up to ten times higher activity after deleting 8-10 amino acid residues from the carboxy terminus of this protein. (Dobeli et al., J. Biotechnology 7:199-216 (1988).)

[0105] Moreover, ample evidence demonstrates that variants often retain a biological activity similar to that of the naturally occurring protein. For example, Gayle and coworkers (J. Biol. Chem. 268:22105-22111 (1993)) conducted extensive mutational analysis of human cytokine IL-1a. They used random mutagenesis to generate over 3,500 individual IL-1a mutants that averaged 2.5 amino acid changes per variant over the entire length of the molecule. Multiple mutations were examined at every possible amino acid position. The investigators found that “[m]ost of the molecule could be altered with little effect on either [binding or biological activity].” In fact, only 23 unique amino acid sequences, out of more than 3,500 nucleotide sequences examined, produced a protein that significantly differed in activity from wild-type.

[0106] Furthermore, even if deleting one or more amino acids from the N-terminus or C-terminus of a polypeptide results in modification or loss of one or more biological functions, other biological activities may still be retained. For example, the ability of a deletion variant to induce and/or to bind antibodies which recognize the secreted form will likely be retained when less than the majority of the residues of the secreted form are removed from the N-terminus or C-terminus. Whether a particular polypeptide lacking N- or C-terminal residues of a protein retains such immunogenic activities can readily be determined by routine methods described herein and otherwise known in the art.

[0107] Thus, the invention further includes polypeptide variants which have a functional activity (e.g., biological activity and/or therapeutic activity). In highly preferred embodiments the invention provides variants of albumin fusion proteins that have a functional activity (e.g., biological activity and/or therapeutic activity) that corresponds to one or more biological and/or therapeutic activities of the Therapeutic protein corresponding to the Therapeutic protein portion of the albumin fusion protein. Such variants include deletions, insertions, inversions, repeats, and substitutions selected according to general rules known in the art so as have little effect on activity.

[0108] In preferred embodiments, the variants of the invention have conservative substitutions. By “conservative substitutions” is intended swaps within groups such as replacement of the aliphatic or hydrophobic amino acids Ala, Val, Leu and Ile; replacement of the hydroxyl residues Ser and Thr; replacement of the acidic residues Asp and Glu; replacement of the amide residues Asn and Gln, replacement of the basic residues Lys, Arg, and His; replacement of the aromatic residues Phe, Tyr, and Tip, and replacement of the small-sized amino acids Ala, Ser, Thr, Met, and Gly.

[0109] Guidance concerning how to make phenotypically silent amino acid substitutions is provided, for example, in Bowie et al., “Deciphering the Message in Protein Sequences: Tolerance to Amino Acid Substitutions,” Science 247:1306-1310 (1990), wherein the authors indicate that there are two main strategies for studying the tolerance of an amino acid sequence to change.

[0110] The first strategy exploits the tolerance of amino acid substitutions by natural selection during the process of evolution. By comparing amino acid sequences in different species, conserved amino acids can be identified. These conserved amino acids are likely important for protein function. In contrast, the amino acid positions where substitutions have been tolerated by natural selection indicates that these positions are not critical for protein function. Thus, positions tolerating amino acid substitution could be modified while still maintaining biological activity of the protein.

[0111] The second strategy uses genetic engineering to introduce amino acid changes at specific positions of a cloned gene to identify regions critical for protein function. For example, site directed mutagenesis or alanine-scanning mutagenesis (introduction of single alanine mutations at every residue in the molecule) can be used. See Cunningham and Wells, Science 244:1081-1085 (1989). The resulting mutant molecules can then be tested for biological activity.

[0112] As the authors state, these two strategies have revealed that proteins are surprisingly tolerant of amino acid substitutions. The authors further indicate which amino acid changes are likely to be permissive at certain amino acid positions in the protein. For example, most buried (within the tertiary structure of the protein) amino acid residues require nonpolar side chains, whereas few features of surface side chains are generally conserved. Moreover, tolerated conservative amino acid substitutions involve replacement of the aliphatic or hydrophobic amino acids Ala, Val, Leu and Ile; replacement of the hydroxyl residues Ser and Thr; replacement of the acidic residues Asp and Glu; replacement of the amide residues Asn and Gln, replacement of the basic residues Lys, Arg, and His; replacement of the aromatic residues Phe, Tyr, and Tip, and replacement of the small-sized amino acids Ala, Ser, Thr, Met, and Gly. Besides conservative amino acid substitution, variants of the present invention include (i) polypeptides containing substitutions of one or more of the non-conserved amino acid residues, where the substituted amino acid residues may or may not be one encoded by the genetic code, or (ii) polypeptides containing substitutions of one or more of the amino acid residues having a substituent group, or (iii) polypeptides which have been fused with or chemically conjugated to another compound, such as a compound to increase the stability and/or solubility of the polypeptide (for example, polyethylene glycol), (iv) polypeptide containing additional amino acids, such as, for example, an IgG Fc fusion region peptide. Such variant polypeptides are deemed to be within the scope of those skilled in the art from the teachings herein.

[0113] For example, polypeptide variants containing amino acid substitutions of charged amino acids with other charged or neutral amino acids may produce proteins with improved characteristics, such as less aggregation. Aggregation of pharmaceutical formulations both reduces activity and increases clearance due to the aggregate's immunogenic activity. See Pinckard et al., Clin. Exp. Immunol. 2:331-340 (1967); Robbins et al., Diabetes 36: 838-845 (1987); Cleland et al., Crit. Rev. Therapeutic Drug Carrier Systems 10:307-377 (1993).

[0114] In specific embodiments, the polypeptides of the invention comprise, or alternatively, consist of, fragments or variants of the amino acid sequence of a Therapeutic protein described herein and/or human serum albumin, and/or albumin fusion protein of the invention, wherein the fragments or variants have 1-5, 5-10, 5-25, 5-50, 10-50 or 50-150, amino acid residue additions, substitutions, and/or deletions when compared to the reference amino acid sequence. In preferred embodiments, the amino acid substitutions are conservative. Nucleic acids encoding these polypeptides are also encompassed by the invention.

[0115] The polypeptide of the present invention can be composed of amino acids joined to each other by peptide bonds or modified peptide bonds, i.e., peptide isosteres, and may contain amino acids other than the 20 gene-encoded amino acids. The polypeptides may be modified by either natural processes, such as post-translational processing, or by chemical modification techniques which are well known in the art. Such modifications are well described in basic texts and in more detailed monographs, as well as in a voluminous research literature. Modifications can occur anywhere in a polypeptide, including the peptide backbone, the amino acid side-chains and the amino or carboxyl termini. It will be appreciated that the same type of modification may be present in the same or varying degrees at several sites in a given polypeptide. Also, a given polypeptide may contain many types of modifications. Polypeptides may be branched, for example, as a result of ubiquitination, and they may be cyclic, with or without branching. Cyclic, branched, and branched cyclic polypeptides may result from posttranslation natural processes or may be made by synthetic methods. Modifications include acetylation, acylation, ADP-ribosylation, amidation, covalent attachment of flavin, covalent attachment of a heme moiety, covalent attachment of a nucleotide or nucleotide derivative, covalent attachment of a lipid or lipid derivative, covalent attachment of phosphotidylinositol, cross-linking, cyclization, disulfide bond formation, demethylation, formation of covalent cross-links, formation of cysteine, formation of pyroglutamate, formylation, gamma-carboxylation, glycosylation, GPI anchor formation, hydroxylation, iodination, methylation, myristylation, oxidation, pegylation, proteolytic processing, phosphorylation, prenylation, racemization, selenoylation, sulfation, transfer-RNA mediated addition of amino acids to proteins such as arginylation, and ubiquitination. (See, for instance, PROTEINS—STRUCTURE AND MOLECULAR PROPERTIES, 2nd Ed., T. E. Creighton, W. H. Freeman and Company, New York (1993); POST-TRANSLATIONAL COVALENT MODIFICATION OF PROTEINS, B. C. Johnson, Ed., Academic Press, New York, pgs. 1-12 (1983); Seifter et al., Meth. Enzymol. 182:626-646 (1990); Rattan et al., Ann. N.Y. Acad. Sci. 663:48-62 (1992)).

[0116] Functional Activity

[0117] “A polypeptide having functional activity” refers to a polypeptide capable of displaying one or more known functional activities associated with the full-length, pro-protein, and/or mature form of a Therapeutic protein. Such functional activities include, but are not limited to, biological activity, antigenicity [ability to bind (or compete with a polypeptide for binding) to an anti-polypeptide antibody], immunogenicity (ability to generate antibody which binds to a specific polypeptide of the invention), ability to form multimers with polypeptides of the invention, and ability to bind to a receptor or ligand for a polypeptide.

[0118] “A polypeptide having biological activity” refers to a polypeptide exhibiting activity similar to, but not necessarily identical to, an activity of a Therapeutic protein of the present invention, including mature forms, as measured in a particular biological assay, with or without dose dependency. In the case where dose dependency does exist, it need not be identical to that of the polypeptide, but rather substantially similar to the dose-dependence in a given activity as compared to the polypeptide of the present invention (i.e., the candidate polypeptide will exhibit greater activity or not more than about 25-fold less and, preferably, not more than about tenfold less activity, and most preferably, not more than about three-fold less activity relative to the polypeptide of the present invention).

[0119] In preferred embodiments, an albumin fusion protein of the invention has at least one biological and/or therapeutic activity associated with the Therapeutic protein (or fragment or variant thereof) when it is not fused to albumin.

[0120] The albumin fusion proteins of the invention can be assayed for functional activity (e.g., biological activity) using or routinely modifying assays known in the art, as well as assays described herein. Additionally, one of skill in the art may routinely assay fragments of a Therapeutic protein corresponding to a Therapeutic protein portion of an albumin fusion protein of the invention, for activity using assays referenced in its corresponding row of Table 1. Further, one of skill in the art may routinely assay fragments of an albumin protein corresponding to an albumin protein portion of an albumin fusion protein of the invention, for activity using assays known in the art and/or as described in the Examples section below.

[0121] For example, in one embodiment where one is assaying for the ability of an albumin fusion protein of the invention to bind or compete with a Therapeutic protein for binding to an anti-Therapeutic polypeptide antibody and/or anti-albumin antibody, various immunoassays known in the art can be used, including but not limited to, competitive and non-competitive assay systems using techniques such as radioimmunoassays, ELISA (enzyme linked immunosorbent assay), “sandwich” immunoassays, immunoradiometric assays, gel diffusion precipitation reactions, immunodiffusion assays, in situ immunoassays (using colloidal gold, enzyme or radioisotope labels, for example), western blots, precipitation reactions, agglutination assays (e.g., gel agglutination assays, hemagglutination assays), complement fixation assays, immunofluorescence assays, protein A assays, and immunoelectrophoresis assays, etc. In one embodiment, antibody binding is detected by detecting a label on the primary antibody. In another embodiment, the primary antibody is detected by detecting binding of a secondary antibody or reagent to the primary antibody. In a further embodiment, the secondary antibody is labeled. Many means are known in the art for detecting binding in an immunoassay and are within the scope of the present invention.

[0122] In a preferred embodiment, where a binding partner (e.g., a receptor or a ligand) of a Therapeutic protein is identified, binding to that binding partner by an albumin fusion protein containing that Therapeutic protein as the Therapeutic protein portion of the fusion can be assayed, e.g., by means well-known in the art, such as, for example, reducing and non-reducing gel chromatography, protein affinity chromatography, and affinity blotting. See generally, Phizicky et al., Microbiol. Rev. 59:94-123 (1995). In another embodiment, the ability of physiological correlates of an albumin fusion protein of the present invention to bind to a substrate(s) of the Therapeutic polypeptide corresponding to the Therapeutic portion of the albumin fusion protein of the invention can be routinely assayed using techniques known in the art.

[0123] In an alternative embodiment, where the ability of an albumin fusion protein of the invention to multimerize is being evaluated, association with other components of the multimer can be assayed, e.g., by means well-known in the art, such as, for example, reducing and non-reducing gel chromatography, protein affinity chromatography, and affinity blotting. See generally, Phizicky et al., supra.

[0124] In preferred embodiments, an albumin fusion protein of the invention comprising all or a portion of an antibody that binds a Therapeutic protein, has at least one biological and/or therapeutic activity (e.g., to specifically bind a polypeptide or epitope) associated with the antibody that binds a Therapeutic protein (or fragment or variant thereof) when it is not fused to albumin. In other preferred embodiments, the biological activity and/or therapeutic activity of an albumin fusion protein of the invention comprising all or a portion of an antibody that binds a Therapeutic protein is the inhibition (i.e. antagonism) or activation (i.e., agonism) of one or more of the biological activities and/or therapeutic activities associated with the polypeptide that is specifically bound by antibody that binds a Therapeutic protein.

[0125] Albumin fusion proteins of the invention (e.g., comprising at least a fragment or variant of an antibody that binds a Therapeutic protein) may be characterized in a variety of ways. In particular, albumin fusion proteins of the invention comprising at least a fragment or variant of an antibody that binds a Therapeutic protein may be assayed for the ability to specifically bind to the same antigens specifically bound by the antibody that binds a Therapeutic protein corresponding to the Therapeutic protein portion of the albumin fusion protein using techniques described herein or routinely modifying techniques known in the art.

[0126] Assays for the ability of the albumin fusion proteins of the invention (e.g., comprising at least a fragment or variant of an antibody that binds a Therapeutic protein) to (specifically) bind a specific protein or epitope may be performed in solution (e.g., Houghten, Bio/Techniques 13:412-421 (1992)), on beads (e.g., Lam, Nature 354:82-84 (1991)), on chips (e.g., Fodor, Nature 364:555-556 (1993)), on bacteria (e.g., U.S. Pat. No. 5,223,409), on spores (e.g., U.S. Pat. Nos. 5,571,698; 5,403,484; and 5,223,409), on plasmids (e.g., Cull et al., Proc. Natl. Acad. Sci. USA 89:1865-1869 (1992)) or on phage (e.g., Scott and Smith, Science 249:386-390 (1990); Devlin, Science 249:404-406 (1990); Cwirla et al., Proc. Natl. Acad. Sci. USA 87:6378-6382 (1990); and Felici, J. Mol. Biol. 222:301-310 (1991)) (each of these references is incorporated herein in its entirety by reference). Albumin fusion proteins of the invention comprising at least a fragment or variant of a Therapeutic antibody may also be assayed for their specificity and affinity for a specific protein or epitope using or routinely modifying techniques described herein or otherwise known in the art.

[0127] The albumin fusion proteins of the invention comprising at least a fragment or variant of an antibody that binds a Therapeutic protein may be assayed for cross-reactivity with other antigens (e.g., molecules that have sequence/structure conservation with the molecule(s) specifically bound by the antibody that binds a Therapeutic protein (or fragment or variant thereof) corresponding to the Therapeutic protein portion of the albumin fusion protein of the invention) by any method known in the art.

[0128] Immunoassays which can be used to analyze (immunospecific) binding and cross-reactivity include, but are not limited to, competitive and non-competitive assay systems using techniques such as western blots, radioimmunoassays, ELISA (enzyme linked immunosorbent assay), “sandwich” immunoassays, immunoprecipitation assays, precipitin reactions, gel diffusion precipitin reactions, immunodiffusion assays, agglutination assays, complement-fixation assays, immunoradiometric assays, fluorescent immunoassays, and protein A immunoassays, to name but a few. Such assays are routine and well known in the art (see, e.g., Ausubel et al, eds, 1994, Current Protocols in Molecular Biology, Vol. 1, John Wiley & Sons, Inc., New York, which is incorporated by reference herein in its entirety). Exemplary immunoassays are described briefly below (but are not intended by way of limitation).

[0129] Immunoprecipitation protocols generally comprise lysing a population of cells in a lysis buffer such as RIPA buffer (1% NP-40 or Triton X-100, 1% sodium deoxycholate, 0.1% SDS, 0.15 M NaCl, 0.01 M sodium phosphate at pH 7.2, 1% Trasylol) supplemented with protein phosphatase and/or protease inhibitors (e.g., EDTA, PMSF, aprotinin, sodium vanadate), adding the albumin fusion protein of the invention (e.g., comprising at least a fragment or variant of an antibody that binds a Therapeutic protein) to the cell lysate, incubating for a period of time (e.g., 1 to 4 hours) at 40 degrees C., adding sepharose beads coupled to an anti-albumin antibody, for example, to the cell lysate, incubating for about an hour or more at 40 degrees C., washing the beads in lysis buffer and resuspending the beads in SDS/sample buffer. The ability of the albumin fusion protein of the invention to immunoprecipitate a particular antigen can be assessed by, e.g., western blot analysis. One of skill in the art would be knowledgeable as to the parameters that can be modified to increase the binding of the albumin fusion protein to an antigen and decrease the background (e.g., pre-clearing the cell lysate with sepharose beads). For further discussion regarding immunoprecipitation protocols see, e.g., Ausubel et al, eds, 1994, Current Protocols in Molecular Biology, Vol. 1, John Wiley & Sons, Inc., New York at 10.16.1.

[0130] Western blot analysis generally comprises preparing protein samples, electrophoresis of the protein samples in a polyacrylamide gel (e.g., 8%-20% SOS-PAGE depending on the molecular weight of the antigen), transferring the protein sample from the polyacrylamide gel to a membrane such as nitrocellulose, PVDF or nylon, blocking the membrane in blocking solution (e.g., PBS with 3% BSA or non-fat milk), washing the membrane in washing buffer (e.g., PBS-Tween 20), applying the albumin fusion protein of the invention (diluted in blocking buffer) to the membrane, washing the membrane in washing buffer, applying a secondary antibody (which recognizes the albumin fusion protein, e.g., an anti-human serum albumin antibody) conjugated to an enzymatic substrate (e.g., horseradish peroxidase or alkaline phosphatase) or radioactive molecule (e.g., ³²P or ¹²⁵I) diluted in blocking buffer, washing the membrane in wash buffer, and detecting the presence of the antigen. One of skill in the art would be knowledgeable as to the parameters that can be modified to increase the signal detected and to reduce the background noise. For further discussion regarding western blot protocols see, e.g., Ausubel et al, eds, 1994, Current Protocols in Molecular Biology, Vol. 1, John Wiley & Sons, Inc., New York at 10.8.1.

[0131] ELISAs comprise preparing antigen, coating the well of a 96-well microtiter plate with the antigen, washing away antigen that did not bind the wells, adding the albumin fusion protein (e.g., comprising at least a fragment or variant of an antibody that binds a Therapeutic protein) of the invention conjugated to a detectable compound such as an enzymatic substrate (e.g., horseradish peroxidase or alkaline phosphatase) to the wells and incubating for a period of time, washing away unbound or non-specifically bound albumin fusion proteins, and detecting the presence of the albumin fusion proteins specifically bound to the antigen coating the well. In ELISAs the albumin fusion protein does not have to be conjugated to a detectable compound; instead, a second antibody (which recognizes albumin fusion protein) conjugated to a detectable compound may be added to the well. Further, instead of coating the well with the antigen, the albumin fusion protein may be coated to the well. In this case, the detectable molecule could be the antigen conjugated to a detectable compound such as an enzymatic substrate (e.g., horseradish peroxidase or alkaline phosphatase). One of skill in the art would be knowledgeable as to the parameters that can be modified to increase the signal detected as well as other variations of ELISAs known in the art. For further discussion regarding ELISAs see, e.g., Ausubel et al, eds, 1994, Current Protocols in Molecular Biology, Vol. 1, John Wiley & Sons, Inc., New York at 11.2.1.

[0132] The binding affinity of an albumin fusion protein to a protein, antigen, or epitope and the off-rate of an albumin fusion protein-protein/antigen/epitope interaction can be determined by competitive binding assays. One example of a competitive binding assay is a radioimmunoassay comprising the incubation of labeled antigen (e.g., ³H or ¹²⁵I) with the albumin fusion protein of the invention in the presence of increasing amounts of unlabeled antigen, and the detection of the antibody bound to the labeled antigen. The affinity of the albumin fusion protein of the present invention for a specific protein, antigen, or epitope and the binding off-rates can be determined from the data by Scatchard plot analysis. Competition with a second protein that binds the same protein, antigen or epitope as the albumin fusion protein, can also be determined using radioimmunoassays. In this case, the protein, antigen or epitope is incubated with an albumin fusion protein of the present invention conjugated to a labeled compound (e.g., ³H or ¹²⁵I) in the presence of increasing amounts of an unlabeled second protein that binds the same protein, antigen, or epitope as the albumin fusion protein of the invention.

[0133] In a preferred embodiment, BIAcore kinetic analysis is used to determine the binding on and off rates of albumin fusion proteins of the invention to a protein, antigen or epitope. BIAcore kinetic analysis comprises analyzing the binding and dissociation of albumin fusion proteins, or specific polypeptides, antigens or epitopes from chips with immobilized specific polypeptides, antigens or epitopes or albumin fusion proteins, respectively, on their surface.

[0134] Antibodies that bind a Therapeutic protein corresponding to the Therapeutic protein portion of an albumin fusion protein of the invention may also be described or specified in terms of their binding affinity for a given protein or antigen, preferably the antigen which they specifically bind. Preferred binding affinities include those with a dissociation constant or Kd less than 5×10⁻² M, 10⁻² M, 5×10⁻³ M, 10⁻³ M, 5×10⁻⁴ M, 10⁻⁴ M. More preferred binding affinities include those with a dissociation constant or Kd less than 5×10⁻⁵ M, 10⁻⁵ M, 5×10⁻⁶ M, 10⁻⁶M, 5×10⁻⁷ M, 10⁷ M, 5×10⁻⁸ M or 10⁻⁸ M. Even more preferred binding affinities include those with a dissociation constant or Kd less than 5×10⁻⁹ M, 10⁻⁹ M, 5×10⁻¹⁰ M, 10⁻¹⁰ M, 5×10⁻¹¹ M, 10⁻¹¹ M, 5×10⁻¹² M, ¹⁰⁻¹² M, 5×10⁻¹³ M, 10⁻¹³ M, 5×10⁻¹⁴ M, 10⁻¹⁴ M, 5×10⁻¹⁵ M, or 10⁻¹⁵ M. In preferred embodiments, albumin fusion proteins comprising at least a fragment or variant of an antibody that binds a Therapeutic protein, has an affinity for a given protein or epitope similar to that of the corresponding antibody (not fused to albumin) that binds a Therapeutic protein, taking into account the valency of the albumin fusion protein (comprising at least a fragment or variant of an antibody that binds a Therapeutic protein) and the valency of the corresponding antibody. In addition, assays described herein (see Examples and Table 1) and otherwise known in the art may routinely be applied to measure the ability of albumin fusion proteins of the present invention and fragments, variants and derivatives thereof to elicit biological activity and/or Therapeutic activity (either in vitro or in vivo) related to either the Therapeutic protein portion and/or albumin portion of the albumin fusion protein of the present invention. Other methods will be known to the skilled artisan and are within the scope of the invention.

[0135] Albumin

[0136] As described above, an albumin fusion protein of the invention comprises at least a fragment or variant of a Therapeutic protein and at least a fragment or variant of human serum albumin, which are associated with one another, preferably by genetic fusion or chemical conjugation.

[0137] The terms, human serum albumin (HSA) and human albumin (HA) are used interchangeably herein. The terms, “albumin and “serum albumin” are broader, and encompass human serum albumin (and fragments and variants thereof) as well as albumin from other species (and fragments and variants thereof).

[0138] As used herein, “albumin” refers collectively to albumin protein or amino acid sequence, or an albumin fragment or variant, having one or more functional activities (e.g., biological activities) of albumin. In particular, “albumin” refers to human albumin or fragments thereof (see EP 201 239, EP 322 094 WO 97/24445, WO95/23857) especially the mature form of human albumin as shown in FIG. 15 and SEQ ID NO:18, or albumin from other vertebrates or fragments thereof, or analogs or variants of these molecules or fragments thereof.

[0139] In preferred embodiments, the human serum albumin protein used in the albumin fusion proteins of the invention contains one or both of the following sets of point mutations with reference to SEQ ID NO:18: Leu-407 to Ala, Leu-408 to Val, Val-409 to Ala, and Arg-410 to Ala; or Arg-410 to A, Lys-413 to Gln, and Lys-414 to Gln (see, e.g., International Publication No. WO95/23857, hereby incorporated in its entirety by reference herein). In even more preferred embodiments, albumin fusion proteins of the invention that contain one or both of above-described sets of point mutations have improved stability/resistance to yeast Yap3p proteolytic cleavage, allowing increased production of recombinant albumin fusion proteins expressed in yeast host cells.

[0140] As used herein, a portion of albumin sufficient to prolong the therapeutic activity or shelf-life of the Therapeutic protein refers to a portion of albumin sufficient in length or structure to stabilize or prolong the therapeutic activity of the protein so that the shelf life of the Therapeutic protein portion of the albumin fusion protein is prolonged or extended compared to the shelf-life in the non-fusion state. The albumin portion of the albumin fusion proteins may comprise the full length of the HA sequence as described above or as shown in FIG. 15, or may include one or more fragments thereof that are capable of stabilizing or prolonging the therapeutic activity. Such fragments may be of 10 or more amino acids in length or may include about 15, 20, 25, 30, 50, or more contiguous amino acids from the HA sequence or may include part or all of specific domains of HA. For instance, one or more fragments of HA spanning the first two immunoglobulin-like domains may be used.

[0141] The albumin portion of the albumin fusion proteins of the invention may be a variant of normal HA. The Therapeutic protein portion of the albumin fusion proteins of the invention may also be variants of the Therapeutic proteins as described herein. The term “variants” includes insertions, deletions and substitutions, either conservative or non conservative, where such changes do not substantially alter one or more of the oncotic, useful ligand-binding and non-immunogenic properties of albumin, or the active site, or active domain which confers the therapeutic activities of the Therapeutic proteins.

[0142] In particular, the albumin fusion proteins of the invention may include naturally occurring polymorphic variants of human albumin and fragments of human albumin, for example those fragments disclosed in EP 322 094 (namely HA (Pn), where n is 369 to 419). The albumin may be derived from any vertebrate, especially any mammal, for example human, cow, sheep, or pig. Non-mammalian albumins include, but are not limited to, hen and salmon. The albumin portion of the albumin fusion protein may be from a different animal than the Therapeutic protein portion.

[0143] Generally speaking, an HA fragment or variant will be at least 100 amino acids long, preferably at least 150 amino acids long. The HA variant may consist of or alternatively comprise at least one whole domain of HA, for example domains 1 (amino acids 1-194 of SEQ ID NO:18), 2 (amino acids 195-387 of SEQ ID NO:18), 3 (amino acids 388-585 of SEQ ID NO:18), 1+2 (1-387 of SEQ ID NO:18), 2+3 (195-585 of SEQ ID NO:18) or 1+3 (amino acids 1-194 of SEQ ID NO:18+amino acids 388-585 of SEQ ID NO:18). Each domain is itself made up of two homologous subdomains namely 1-105, 120-194, 195-291, 316-387, 388-491 and 512-585, with flexible inter-subdomain linker regions comprising residues Lys106 to Glu119, Glu292 to Val315 and Glu492 to Ala511.

[0144] Preferably, the albumin portion of an albumin fusion protein of the invention comprises at least one subdomain or domain of HA or conservative modifications thereof. If the fusion is based on subdomains, some or all of the adjacent linker is preferably used to link to the Therapeutic protein moiety.

[0145] Antibodies that Specifically Bind Therapeutic Proteins are also Therapeutic Proteins

[0146] The present invention also encompasses albumin fusion proteins that comprise at least a fragment or variant of an antibody that specifically binds a Therapeutic protein disclosed in Table 1. It is specifically contemplated that the term “Therapeutic protein” encompasses antibodies that bind a Therapeutic protein (e.g., as Described in column I of Table 1) and fragments and variants thereof. Thus an albumin fusion protein of the invention may contain at least a fragment or variant of a Therapeutic protein, and/or at least a fragment or variant of an an antibody that binds a Therapeutic protein.

[0147] Antibody Structure and Background

[0148] The basic antibody structural unit is known to comprise a tetramer. Each tetramer is composed of two identical pairs of polypeptide chains, each pair having one “light” (about 25 kDa) and one “heavy” chain (about 50-70 kDa). The amino-terminal portion of each chain includes a variable region of about 100 to 110 or more amino acids primarily responsible for antigen recognition. The carboxy-terminal portion of each chain defines a constant region primarily responsible for effector function. Human light chains are classified as kappa and lambda light chains. Heavy chains are classified as mu, delta, gamma, alpha, or epsilon, and define the antibody's isotype as IgM, IgD, IgG, IgA, and IgE, respectively. See generally, Fundamental Immunology Chapters 3-5 (Paul, W., ed., 4th ed. Raven Press, N.Y. (1998)) (incorporated by reference in its entirety for all purposes). The variable regions of each light/heavy chain pair form the antibody binding site.

[0149] Thus, an intact IgG antibody has two binding sites. Except in bifunctional or bispecific antibodies, the two binding sites are the same.

[0150] The chains all exhibit the same general structure of relatively conserved framework regions (FR) joined by three hypervariable regions, also called complementarity determining regions or CDRs. The CDR regions, in general, are the portions of the antibody which make contact with the antigen and determine its specificity. The CDRs from the heavy and the light chains of each pair are aligned by the framework regions, enabling binding to a specific epitope. From N-terminal to C-terminal, both light and heavy chains variable regions comprise the domains FR1, CDR1, FR2, CDR2, FR3, CDR3 and FR4. The variable regions are connected to the heavy or light chain constant region. The assignment of amino acids to each domain is in accordance with the definitions of Kabat Sequences of Proteins of Immunological Interest (National Institutes of Health, Bethesda, Md. (1987 and 1991)), or Chothia & Lesk J Mol. Biol. 196:901-917 (1987); Chothia et al. Nature 342:878-883 (1989).

[0151] As used herein, “antibody” refers to immunoglobulin molecules and immunologically active portions of immunoglobulin molecules, i.e., molecules that contain an antigen binding site that specifically binds an antigen (e.g., a molecule containing one or more CDR regions of an antibody). Antibodies that may correspond to a Therapeutic protein portion of an albumin fusion protein include, but are not limited to, monoclonal, multispecific, human, humanized or chimeric antibodies, single chain antibodies (e.g., single chain Fvs), Fab fragments, F(ab′) fragments, fragments produced by a Fab expression library, anti-idiotypic (anti-Id) antibodies (including, e.g., anti-Id antibodies specific to antibodies of the invention), and epitope-binding fragments of any of the above (e.g., VH domains, VL domains, or one or more CDR regions).

[0152] Antibodies that Bind Therapeutic Proteins

[0153] The present invention encompasses albumin fusion proteins that comprise at least a fragment or variant of an antibody that binds a Therapeutic Protein (e.g., as disclosed in Table 1) or fragment or variant thereof.

[0154] Antibodies that bind a Therapeutic protein (or fragment or variant thereof) may be from any animal origin, including birds and mammals. Preferably, the antibodies are human, murine (e.g., mouse and rat), donkey, sheep, rabbit, goat, guinea pig, camel, horse, or chicken antibodies. Most preferably, the antibodies are human antibodies. As used herein, “human” antibodies include antibodies having the amino acid sequence of a human immunoglobulin and include antibodies isolated from human immunoglobulin libraries and xenomice or other organisms that have been genetically engineered to produce human antibodies.

[0155] The antibody molecules that bind to a Therapeutic protein and that may correspond to a Therapeutic protein portion of an albumin fusion protein of the invention can be of any type (e.g., IgG, IgE, IgM, IgD, IgA and IgY), class (e.g., IgG1, IgG2, IgG3, IgG4, IgA1 and IgA2) or subclass of immunoglobulin molecule. In preferred embodiments, the antibody molecules that bind to a Therapeutic protein and that may correspond to a Therapeutic protein portion of an albumin fusion protein of the invention are IgG1. In other preferred embodiments, the immunoglobulin molecules that bind to a Therapeutic protein and that may correspond to a Therapeutic protein portion of an albumin fusion protein of the invention are IgG2. In other preferred embodiments, the immunoglobulin molecules that bind to a Therapeutic protein and that may correspond to a Therapeutic protein portion of an albumin fusion protein of the invention are IgG4.

[0156] Most preferably the antibodies that bind to a Therapeutic protein and that may correspond to a Therapeutic protein portion of an albumin fusion protein of the invention are human antigen-binding antibody fragments of the present invention and include, but are not limited to, Fab, Fab′ and F(ab′)2, Fd, single-chain Fvs (scFv), single-chain antibodies, disulfide-linked Fvs (sdFv) and fragments comprising either a VL or VH domain. Antigen-binding antibody fragments, including single-chain antibodies, may comprise the variable region(s) alone or in combination with the entirety or a portion of the following: hinge region, CH1, CH2, and CH3 domains.

[0157] The antibodies that bind to a Therapeutic protein and that may correspond to a Therapeutic protein portion of an albumin fusion protein of the invention may be monospecific, bispecific, trispecific or of greater multispecificity. Multispecific antibodies may be specific for different epitopes of a Therapeutic protein or may be specific for both a Therapeutic protein as well as for a heterologous epitope, such as a heterologous polypeptide or solid support material. See, e.g., PCT publications WO 93/17715; WO 92/08802; WO 91/00360; WO 92/05793; Tutt, et al., J. Immunol. 147:60-69 (1991); U.S. Pat. Nos. 4,474,893; 4,714,681; 4,925,648; 5,573,920; 5,601,819; Kostelny et al., J. Immunol. 148:1547-1553 (1992).

[0158] Antibodies that bind a Therapeutic protein (or fragment or variant thereof) may be bispecific or bifunctional which means that the antibody is an artificial hybrid antibody having two different heavy/light chain pairs and two different binding sites. Bispecific antibodies can be produced by a variety of methods including fusion of hybridomas or linking of Fab′ fragments. See, e.g., Songsivilai & Lachmann Clin. Exp. Immunol. 79: 315-321 (1990), Kostelny et al. J Immunol. 148:1547 1553 (1992). In addition, bispecific antibodies may be formed as “diabodies” (Holliger et al. “Diabodies': small bivalent and bispecific antibody fragments” PNAS USA 90:6444-6448 (1993)) or “Janusins” (Traunecker et al. “Bispecific single chain molecules (Janusins) target cytotoxic lymphocytes on HIV infected cells” EMBO J 10:3655-3659 (1991) and Traunecker et al. “Janusin: new molecular design for bispecific reagents” Int J Cancer Suppl 7:51-52 (1992)).

[0159] The present invention also provides albumin fusion proteins that comprise, fragments or variants (including derivatives) of an antibody described herein or known elsewhere in the art. Standard techniques known to those of skill in the art can be used to introduce mutations in the nucleotide sequence encoding a molecule of the invention, including, for example, site-directed mutagenesis and PCR-mediated mutagenesis which result in amino acid substitutions. Preferably, the variants (including derivatives) encode less than 50 amino acid substitutions, less than 40 amino acid substitutions, less than 30 amino acid substitutions, less than 25 amino acid substitutions, less than 20 amino acid substitutions, less than 15 amino acid substitutions, less than 10 amino acid substitutions, less than 5 amino acid substitutions, less than 4 amino acid substitutions, less than 3 amino acid substitutions, or less than 2 amino acid substitutions relative to the reference VH domain, VHCDR1, VHCDR2, VHCDR3, VL domain, VLCDR1, VLCDR2, or VLCDR3. In specific embodiments, the variants encode substitutions of VHCDR3. In a preferred embodiment, the variants have conservative amino acid substitutions at one or more predicted non-essential amino acid residues.

[0160] Antibodies that bind to a Therapeutic protein and that may correspond to a Therapeutic protein portion of an albumin fusion protein of the invention may be described or specified in terms of the epitope(s) or portion(s) of a Therapeutic protein which they recognize or specifically bind. Antibodies which specifically bind a Therapeutic protein or a specific epitope of a Therapeutic protein may also be excluded. Therefore, the present invention encompasses antibodies that specifically bind Therapeutic proteins, and allows for the exclusion of the same. In preferred embodiments, albumin fusion proteins comprising at least a fragment or variant of an antibody that binds a Therapeutic protein, binds the same epitopes as the.

[0161] Antibodies that bind to a Therapeutic protein and that may correspond to a Therapeutic protein portion of an albumin fusion protein of the invention may also be described or specified in terms of their cross-reactivity. Antibodies that do not bind any other analog, ortholog, or homolog of a Therapeutic protein are included. Antibodies that bind polypeptides with at least 95%, at least 90%, at least 85%, at least 80%, at least 75%, at least 70%, at least 65%, at least 60%, at least 55%, and at least 50% identity (as calculated using methods known in the art and described herein) to a Therapeutic protein are also included in the present invention. In specific embodiments, antibodies that bind to a Therapeutic protein and that may correspond to a Therapeutic protein portion of an albumin fusion protein of the invention cross-react with murine, rat and/or rabbit homologs of human proteins and the corresponding epitopes thereof. Antibodies that do not bind polypeptides with less than 95%, less than 90%, less than 85%, less than 80%, less than 75%, less than 70%, less than 65%, less than 60%, less than 55%, and less than 50% identity (as calculated using methods known in the art and described herein) to a Therapeutic protein are also included in the present invention. In a specific embodiment, the above-described cross-reactivity is with respect to any single specific antigenic or immunogenic polypeptide, or combination(s) of 2, 3, 4, 5, or more of the specific antigenic and/or immunogenic polypeptides disclosed herein. In preferred embodiments, albumin fusion proteins comprising at least a fragment or variant of an antibody that binds a Therapeutic protein, has similar or substantially identical cross reactivity characteristics compared to the.

[0162] Further included in the present invention are antibodies which bind polypeptides encoded by polynucleotides which hybridize to a polynucleotide encoding a Therapeutic protein under stringent hybridization conditions (as described herein). Antibodies that bind to a Therapeutic protein and that may correspond to a Therapeutic protein portion of an albumin fusion protein of the invention may also be described or specified in terms of their binding affinity to a polypeptide of the invention. Preferred binding affinities include those with a dissociation constant or Kd less than 5×10⁻² M, 10⁻² M, 5×10⁻³ M, 10⁻³ M, 5×10⁻⁴ M, 10⁻⁴ M. More preferred binding affinities include those with a dissociation constant or Kd less than 5×10⁻⁵ M, 10⁻⁵ M, 5×10⁻⁶ M, 10⁻⁶M, 5×10⁻⁷ M, 10⁷ M, 5×10⁻⁸ M or 10⁻⁸ M. Even more preferred binding affinities include those with a dissociation constant or Kd less than 5×10⁻⁹ M, 10⁻⁹ M, 5×10⁻¹⁰ M, 10⁻¹⁰ M, 5×10⁻¹¹ M, 10⁻¹¹ M, 5×10¹² M, ¹⁰⁻¹² M, 5×10⁻¹³ M, 10⁻¹³ M, 5×10⁻¹⁴ M, 10⁻¹⁴ M, 5×10⁻¹⁵ M, or 10⁻¹⁵ M. In preferred embodiments, albumin fusion proteins comprising at least a fragment or variant of an antibody that binds a Therapeutic protein, has an affinity for a given protein or epitope similar to that of the corresponding antibody (not fused to albumin) that binds a Therapeutic protein, taking into account the valency of the albumin fusion protein (comprising at least a fragment or variant of an antibody that binds a Therapeutic protein) and the valency of the corresponding antibody.

[0163] The invention also provides antibodies that competitively inhibit binding of an antibody to an epitope of a Therapeutic protein as determined by any method known in the art for determining competitive binding, for example, the immunoassays described herein. In preferred embodiments, the antibody competitively inhibits binding to the epitope by at least 95%, at least 90%, at least 85%, at least 80%, at least 75%, at least 70%, at least 60%, or at least 50%. In preferred embodiments, albumin fusion proteins comprising at least a fragment or variant of an antibody that binds a Therapeutic protein, competitively inhibits binding of an antibody to an epitope of a Therapeutic protein as well as the, competitively inhibits binding of an antibody to an epitope of a Therapeutic protein. In other preferred embodiments, albumin fusion proteins comprising at least a fragment or variant of an antibody that binds a Therapeutic protein, competitively inhibits binding of the to an epitope of a Therapeutic protein by at least 95%, at least 90%, at least 85%, at least 80%, at least 75%, at least 70%, at least 60%, or at least 50%.

[0164] Antibodies that bind to a Therapeutic protein and that may correspond to a Therapeutic protein portion of an albumin fusion protein of the invention may act as agonists or antagonists of the Therapeutic protein. For example, the present invention includes antibodies which disrupt the receptor/ligand interactions with the polypeptides of the invention either partially or fully. The invention features both receptor-specific antibodies and ligand-specific antibodies. The invention also features receptor-specific antibodies which do not prevent ligand binding but prevent receptor activation. Receptor activation (i.e., signaling) may be determined by techniques described herein or otherwise known in the art. For example, receptor activation can be determined by detecting the phosphorylation (e.g., tyrosine or serine/threonine) of the receptor or its substrate by immunoprecipitation followed by western blot analysis (for example, as described supra). In specific embodiments, antibodies are provided that inhibit ligand activity or receptor activity by at least 95%, at least 90%, at least 85%, at least 80%, at least 75%, at least 70%, at least 60%, or at least 50% of the activity in absence of the antibody. In preferred embodiments, albumin fusion proteins comprising at least a fragment or variant of an antibody that binds a Therapeutic protein, has similar or substantially similar characteristics with regard to preventing ligand binding and/or preventing receptor activation compared to the.

[0165] The invention also features receptor-specific antibodies which both prevent ligand binding and receptor activation as well as antibodies that recognize the receptor-ligand complex, and, preferably, do not specifically recognize the unbound receptor or the unbound ligand. Likewise, included in the invention are neutralizing antibodies which bind the ligand and prevent binding of the ligand to the receptor, as well as antibodies which bind the ligand, thereby preventing receptor activation, but do not prevent the ligand from binding the receptor. Further included in the invention are antibodies which activate the receptor. These antibodies may act as receptor agonists, i.e., potentiate or activate either all or a subset of the biological activities of the ligand-mediated receptor activation, for example, by inducing dimerization of the receptor. The antibodies may be specified as agonists, antagonists or inverse agonists for biological activities comprising the specific biological activities of the Therapeutic protreins (e.g. as disclosed in Table 1). The above antibody agonists can be made using methods known in the art. See, e.g., PCT publication WO 96/40281; U.S. Pat. No. 5,811,097; Deng et al., Blood 92(6):1981-1988 (1998); Chen et al., Cancer Res. 58(16):3668-3678 (1998); Harrop et al., J. Immunol. 161(4):1786-1794 (1998); Zhu et al., Cancer Res. 58(15):3209-3214 (1998); Yoon et al., J. Immunol. 160(7):3170-3179 (1998); Prat et al., J. Cell. Sci. 111(Pt2):237-247 (1998); Pitard et al., J. Immunol. Methods 205(2):177-190 (1997); Liautard et al., Cytokine 9(4):233-241 (1997); Carlson et al., J. Biol. Chem. 272(17):11295-11301 (1997); Taryman et al., Neuron 14(4):755-762 (1995); Muller et al., Structure 6(9):1153-1167 (1998); Bartunek et al., Cytokine 8(1):14-20 (1996) (which are all incorporated by reference herein in their entireties). In preferred embodiments, albumin fusion proteins comprising at least a fragment or variant of an antibody that binds a Therapeutic protein, have similar or substantially identical agonist or antagonist properties as the.

[0166] Antibodies that bind to a Therapeutic protein and that may correspond to a Therapeutic protein portion of an albumin fusion protein of the invention may be used, for example, to purify, detect, and target Therapeutic proteins, including both in in vitro and in vivo diagnostic and therapeutic methods. For example, the antibodies have utility in immunoassays for qualitatively and quantitatively measuring levels of the Therapeutic protein in biological samples. See, e.g., Harlow et al., Antibodies: A Laboratory Manual, (Cold Spring Harbor Laboratory Press, 2nd ed. 1988); incorporated by reference herein in its entirety. Likewise, albumin fusion proteins comprising at least a fragment or variant of an antibody that binds a Therapeutic protein, may be used, for example, to purify, detect, and target Therapeutic proteins, including both in in vitro and in vivo diagnostic and therapeutic methods.

[0167] Antibodies that bind to a Therapeutic protein and that may correspond to a Therapeutic protein portion of an albumin fusion protein include derivatives that are modified, i.e, by the covalent attachment of any type of molecule to the antibody. For example, but not by way of limitation, the antibody derivatives include antibodies that have been modified, e.g., by glycosylation, acetylation, pegylation, phosphylation, amidation, derivatization by known protecting/blocking groups, proteolytic cleavage, linkage to a cellular ligand or other protein, etc. Any of numerous chemical modifications may be carried out by known techniques, including, but not limited to specific chemical cleavage, acetylation, formylation, metabolic synthesis of tunicamycin, etc. Additionally, the derivative may contain one or more non-classical amino acids. Albumin fusion proteins of the invention may also be modified as described above.

[0168] Methods of Producing Antibodies that Bind Therapeutic Proteins

[0169] The antibodies that bind to a Therapeutic protein and that may correspond to a Therapeutic protein portion of an albumin fusion protein of the invention may be generated by any suitable method known in the art. Polyclonal antibodies to an antigen-of-interest can be produced by various procedures well known in the art. For example, a Therapeutic protein may be administered to various host animals including, but not limited to, rabbits, mice, rats, etc. to induce the production of sera containing polyclonal antibodies specific for the antigen. Various adjuvants may be used to increase the immunological response, depending on the host species, and include but are not limited to, Freund's (complete and incomplete), mineral gels such as aluminum hydroxide, surface active substances such as lysolecithin, pluronic polyols, polyanions, peptides, oil emulsions, keyhole limpet hemocyanins, dinitrophenol, and potentially useful human adjuvants such as BCG (bacille Calmette-Guerin) and corynebacterium parvum. Such adjuvants are also well known in the art.

[0170] Monoclonal antibodies can be prepared using a wide variety of techniques known in the art including the use of hybridoma, recombinant, and phage display technologies, or a combination thereof. For example, monoclonal antibodies can be produced using hybridoma techniques including those known in the art and taught, for example, in Harlow et al., Antibodies: A Laboratory Manual, (Cold Spring Harbor Laboratory Press, 2nd ed. 1988); Hammerling, et al., in: Monoclonal Antibodies and T-Cell Hybridomas 563-681 (Elsevier, N.Y., 1981) (said references incorporated by reference in their entireties). The term “monoclonal antibody” as used herein is not limited to antibodies produced through hybridoma technology. The term “monoclonal antibody” refers to an antibody that is derived from a single clone, including any eukaryotic, prokaryotic, or phage clone, and not the method by which it is produced.

[0171] Methods for producing and screening for specific antibodies using hybridoma technology are routine and well known in the art. In a non-limiting example, mice can be immunized with a Therapeutic protein or fragment or variant thereof or a cell expressing such a Therapeutic protein or fragment or variant thereof. Once an immune response is detected, e.g., antibodies specific for the antigen are detected in the mouse serum, the mouse spleen is harvested and splenocytes isolated. The splenocytes are then fused by well known techniques to any suitable myeloma cells, for example cells from cell line SP20 available from the ATCC. Hybridomas are selected and cloned by limited dilution. The hybridoma clones are then assayed by methods known in the art for cells that secrete antibodies capable of binding a polypeptide of the invention. Ascites fluid, which generally contains high levels of antibodies, can be generated by immunizing mice with positive hybridoma clones.

[0172] Accordingly, the present invention provides methods of generating monoclonal antibodies as well as antibodies produced by the method comprising culturing a hybridoma cell secreting an antibody wherein, preferably, the hybridoma is generated by fusing splenocytes isolated from a mouse immunized with an antigen of the invention with myeloma cells and then screening the hybridomas resulting from the fusion for hybridoma clones that secrete an antibody able to bind a polypeptide of the invention.

[0173] Another well known method for producing both polyclonal and monoclonal human B cell lines is transformation using Epstein Barr Virus (EBV). Protocols for generating EBV-transformed B cell lines are commonly known in the art, such as, for example, the protocol outlined in Chapter 7.22 of Current Protocols in Immunology, Coligan et al., Eds., 1994, John Wiley & Sons, NY, which is hereby incorporated in its entirety by reference. The source of B cells for transformation is commonly human peripheral blood, but B cells for transformation may also be derived from other sources including, but not limited to, lymph nodes, tonsil, spleen, tumor tissue, and infected tissues. Tissues are generally made into single cell suspensions prior to EBV transformation. Additionally, steps may be taken to either physically remove or inactivate T cells (e.g., by treatment with cyclosporin A) in B cell-containing samples, because T cells from individuals seropositive for anti-EBV antibodies can suppress B cell immortalization by EBV.

[0174] In general, the sample containing human B cells is innoculated with EBV, and cultured for 3-4 weeks. A typical source of EBV is the culture supernatant of the B95-8 cell line (ATCC #VR-1492). Physical signs of EBV transformation can generally be seen towards the end of the 3-4 week culture period. By phase-contrast microscopy, transformed cells may appear large, clear, hairy and tend to aggregate in tight clusters of cells. Initially, EBV lines are generally polyclonal. However, over prolonged periods of cell cultures, EBV lines may become monoclonal or polyclonal as a result of the selective outgrowth of particular B cell clones. Alternatively, polyclonal EBV transformed lines may be subcloned (e.g., by limiting dilution culture) or fused with a suitable fusion partner and plated at limiting dilution to obtain monoclonal B cell lines. Suitable fusion partners for EBV transformed cell lines include mouse myeloma cell lines (e.g., SP2/0, X63-Ag8.653), heteromyeloma cell lines (human x mouse; e.g, SPAM-8, SEC-H20, and CB-F7), and human cell lines (e.g., GM 1500, SKO-007, RPMI 8226, and KR-4). Thus, the present invention also provides a method of generating polyclonal or monoclonal human antibodies against polypeptides of the invention or fragments thereof, comprising EBV-transformation of human B cells.

[0175] Antibody fragments which recognize specific epitopes may be generated by known techniques. For example, Fab and F(ab′)2 fragments of the invention may be produced by proteolytic cleavage of immunoglobulin molecules, using enzymes such as papain (to produce Fab fragments) or pepsin (to produce F(ab′)2 fragments). F(ab′)2 fragments contain the variable region, the light chain constant region and the CH1 domain of the heavy chain.

[0176] For example, antibodies that bind to a Therapeutic protein can also be generated using various phage display methods known in the art. In phage display methods, functional antibody domains are displayed on the surface of phage particles which carry the polynucleotide sequences encoding them. In a particular embodiment, such phage can be utilized to display antigen binding domains expressed from a repertoire or combinatorial antibody library (e.g., human or murine). Phage expressing an antigen binding domain that binds the antigen of interest can be selected or identified with antigen, e.g., using labeled antigen or antigen bound or captured to a solid surface or bead. Phage used in these methods are typically filamentous phage including fd and M13 binding domains expressed from phage with Fab, Fv or disulfide stabilized Fv antibody domains recombinantly fused to either the phage gene III or gene VIII protein. Examples of phage display methods that can be used to make antibodies that bind to a Therapeutic protein include those disclosed in Brinkman et al., J. Immunol. Methods 182:41-50 (1995); Ames et al., J. Immunol. Methods 184:177-186 (1995); Kettleborough et al., Eur. J. Immunol. 24:952-958 (1994); Persic et al., Gene 187 9-18 (1997); Burton et al., Advances in Immunology 57:191-280 (1994); PCT application No. PCT/GB91/01134; PCT publications WO 90/02809; WO 91/10737; WO 92/01047; WO 92/18619; WO 93/11236; WO 95/15982; WO 95/20401; and U.S. Pat. Nos. 5,698,426; 5,223,409; 5,403,484; 5,580,717; 5,427,908; 5,750,753; 5,821,047; 5,571,698; 5,427,908; 5,516,637; 5,780,225; 5,658,727; 5,733,743 and 5,969,108; each of which is incorporated herein by reference in its entirety.

[0177] As described in the above references, after phage selection, the antibody coding regions from the phage can be isolated and used to generate whole antibodies, including human antibodies, or any other desired antigen binding fragment, and expressed in any desired host, including mammalian cells, insect cells, plant cells, yeast, and bacteria, e.g., as described in detail below. For example, techniques to recombinantly produce Fab, Fab′ and F(ab′)2 fragments can also be employed using methods known in the art such as those disclosed in PCT publication WO 92/22324; Mullinax et al., BioTechniques 12(6):864-869 (1992); and Sawai et al., AJRI 34:26-34 (1995); and Better et al., Science 240:1041-1043 (1988) (said references incorporated by reference in their entireties).

[0178] Examples of techniques which can be used to produce single-chain Fvs and antibodies include those described in U.S. Pat. Nos. 4,946,778 and 5,258,498; Huston et al., Methods in Enzymology 203:46-88 (1991); Shu et al., PNAS 90:7995-7999 (1993); and Skerra et al., Science 240:1038-1040 (1988). For some uses, including in vivo use of antibodies in humans and in vitro detection assays, it may be preferable to use chimeric, humanized, or human antibodies. A chimeric antibody is a molecule in which different portions of the antibody are derived from different animal species, such as antibodies having a variable region derived from a murine monoclonal antibody and a human immunoglobulin constant region. Methods for producing chimeric antibodies are known in the art. See e.g., Morrison, Science 229:1202 (1985); Oi et al., BioTechniques 4:214 (1986); Gillies et al., (1989) J. Immunol. Methods 125:191-202; U.S. Pat. Nos. 5,807,715; 4,816,567; and 4,816,397, which are incorporated herein by reference in their entirety. Humanized antibodies are antibody molecules from non-human species antibody that binds the desired antigen having one or more complementarity determining regions (CDRs) from the non-human species and a framework regions from a human immunoglobulin molecule. Often, framework residues in the human framework regions will be substituted with the corresponding residue from the CDR donor antibody to alter, preferably improve, antigen binding. These framework substitutions are identified by methods well known in the art, e.g., by modeling of the interactions of the CDR and framework residues to identify framework residues important for antigen binding and sequence comparison to identify unusual framework residues at particular positions. (See, e.g., Queen et al., U.S. Pat. No. 5,585,089; Riechmann et al., Nature 332:323 (1988), which are incorporated herein by reference in their entireties.) Antibodies can be humanized using a variety of techniques known in the art including, for example, CDR-grafting (EP 239,400; PCT publication WO 91/09967; U.S. Pat. Nos. 5,225,539; 5,530,101; and 5,585,089), veneering or resurfacing (EP 592,106; EP 519,596; Padlan, Molecular Immunology 28(4/5):489-498 (1991); Studnicka et al., Protein Engineering 7(6):805-814 (1994); Roguska. et al., PNAS 91:969-973 (1994)), and chain shuffling (U.S. Pat. No. 5,565,332).

[0179] Completely human antibodies are particularly desirable for therapeutic treatment of human patients. Human antibodies can be made by a variety of methods known in the art including phage display methods described above using antibody libraries derived from human immunoglobulin sequences. See also, U.S. Pat. Nos. 4,444,887 and 4,716,111; and PCT publications WO 98/46645, WO 98/50433, WO 98/24893, WO 98/16654, WO 96/34096, WO 96/33735, and WO 91/10741; each of which is incorporated herein by reference in its entirety.

[0180] Human antibodies can also be produced using transgenic mice which are incapable of expressing functional endogenous immunoglobulins, but which can express human immunoglobulin genes. For example, the human heavy and light chain immunoglobulin gene complexes may be introduced randomly or by homologous recombination into mouse embryonic stem cells. Alternatively, the human variable region, constant region, and diversity region may be introduced into mouse embryonic stem cells in addition to the human heavy and light chain genes. The mouse heavy and light chain immunoglobulin genes may be rendered non-functional separately or simultaneously with the introduction of human immunoglobulin loci by homologous recombination. In particular, homozygous deletion of the JH region prevents endogenous antibody production. The modified embryonic stem cells are expanded and microinjected into blastocysts to produce chimeric mice. The chimeric mice are then bred to produce homozygous offspring which express human antibodies. The transgenic mice are immunized in the normal fashion with a selected antigen, e.g., all or a portion of a polypeptide of the invention. Monoclonal antibodies directed against the antigen can be obtained from the immunized, transgenic mice using conventional hybridoma technology. The human immunoglobulin transgenes harbored by the transgenic mice rearrange during B cell differentiation, and subsequently undergo class switching and somatic mutation. Thus, using such a technique, it is possible to produce therapeutically useful IgG, IgA, IgM and IgE antibodies. For an overview of this technology for producing human antibodies, see Lonberg and Huszar, Int. Rev. Immunol. 13:65-93 (1995). For a detailed discussion of this technology for producing human antibodies and human monoclonal antibodies and protocols for producing such antibodies, see, e.g., PCT publications WO 98/24893; WO 92/01047; WO 96/34096; WO 96/33735; European Patent No. 0 598 877; U.S. Pat. Nos. 5,413,923; 5,625,126; 5,633,425; 5,569,825; 5,661,016; 5,545,806; 5,814,318; 5,885,793; 5,916,771; 5,939,598; 6,075,181; and 6,114,598, which are incorporated by reference herein in their entirety. In addition, companies such as Abgenix, Inc. (Freemont, Calif.) and Genpharm (San Jose, Calif.) can be engaged to provide human antibodies directed against a selected antigen using technology similar to that described above.

[0181] Completely human antibodies which recognize a selected epitope can be generated using a technique referred to as “guided selection.” In this approach a selected non-human monoclonal antibody, e.g., a mouse antibody, is used to guide the selection of a completely human antibody recognizing the same epitope. (Jespers et al., Bio/technology 12:899-903 (1988)).

[0182] Polynucleotides Encoding Antibodies

[0183] The invention further provides polynucleotides comprising a nucleotide sequence encoding an antibody and fragments thereof. The invention also encompasses polynucleotides that hybridize under stringent or alternatively, under lower stringency hybridization conditions, e.g., as defined supra, to polynucleotides that encode an antibody, preferably, that specifically binds to a Therapeutic protein, and more preferably, an antibody that binds to a polypeptide having the amino acid sequence of a “therapeutic protein X as discosed in the “Exemplay Identifier” column of Table 1.

[0184] The polynucleotides may be obtained, and the nucleotide sequence of the polynucleotides determined, by any method known in the art. For example, if the nucleotide sequence of the antibody is known, a polynucleotide encoding the antibody may be assembled from chemically synthesized oligonucleotides (e.g., as described in Kutmeier et al., BioTechniques 17:242 (1994)), which, briefly, involves the synthesis of overlapping oligonucleotides containing portions of the sequence encoding the antibody, annealing and ligating of those oligonucleotides, and then amplification of the ligated oligonucleotides by PCR.

[0185] Alternatively, a polynucleotide encoding an antibody may be generated from nucleic acid from a suitable source. If a clone containing a nucleic acid encoding a particular antibody is not available, but the sequence of the antibody molecule is known, a nucleic acid encoding the immunoglobulin may be chemically synthesized or obtained from a suitable source (e.g., an antibody cDNA library, or a cDNA library generated from, or nucleic acid, preferably poly A+ RNA, isolated from, any tissue or cells expressing the antibody, such as hybridoma cells selected to express an antibody) by PCR amplification using synthetic primers hybridizable to the 3′ and 5′ ends of the sequence or by cloning using an oligonucleotide probe specific for the particular gene sequence to identify, e.g., a cDNA clone from a cDNA library that encodes the antibody. Amplified nucleic acids generated by PCR may then be cloned into replicable cloning vectors using any method well known in the art (See Example 60).

[0186] Once the nucleotide sequence and corresponding amino acid sequence of the antibody is determined, the nucleotide sequence of the antibody may be manipulated using methods well known in the art for the manipulation of nucleotide sequences, e.g., recombinant DNA techniques, site directed mutagenesis, PCR, etc. (see, for example, the techniques described in Sambrook et al., 1990, Molecular Cloning, A Laboratory Manual, 2d Ed., Cold Spring Harbor Laboratory, Cold Spring Harbor, N.Y. and Ausubel et al., eds., 1998, Current Protocols in Molecular Biology, John Wiley & Sons, NY, which are both incorporated by reference herein in their entireties), to generate antibodies having a different amino acid sequence, for example to create amino acid substitutions, deletions, and/or insertions.

[0187] In a specific embodiment, the amino acid sequence of the heavy and/or light chain variable domains may be inspected to identify the sequences of the complementarity determining regions (CDRs) by methods that are well know in the art, e.g., by comparison to known amino acid sequences of other heavy and light chain variable regions to determine the regions of sequence hypervariability. Using routine recombinant DNA techniques, one or more of the CDRs may be inserted within framework regions, e.g., into human framework regions to humanize a non-human antibody, as described supra. The framework regions may be naturally occurring or consensus framework regions, and preferably human framework regions (see, e.g., Chothia et al., J. Mol. Biol. 278: 457-479 (1998) for a listing of human framework regions). Preferably, the polynucleotide generated by the combination of the framework regions and CDRs encodes an antibody that specifically binds a polypeptide of the invention. Preferably, as discussed supra, one or more amino acid substitutions may be made within the framework regions, and, preferably, the amino acid substitutions improve binding of the antibody to its antigen. Additionally, such methods may be used to make amino acid substitutions or deletions of one or more variable region cysteine residues participating in an intrachain disulfide bond to generate antibody molecules lacking one or more intrachain disulfide bonds. Other alterations to the polynucleotide are encompassed by the present invention and within the skill of the art.

[0188] In addition, techniques developed for the production of “chimeric antibodies” (Morrison et al., Proc. Natl. Acad. Sci. 81:851-855 (1984); Neuberger et al., Nature 312:604-608 (1984); Takeda et al., Nature 314:452-454 (1985)) by splicing genes from a mouse antibody molecule of appropriate antigen specificity together with genes from a human antibody molecule of appropriate biological activity can be used. As described supra, a chimeric antibody is a molecule in which different portions are derived from different animal species, such as those having a variable region derived from a murine mAb and a human immunoglobulin constant region, e.g., humanized antibodies.

[0189] Alternatively, techniques described for the production of single chain antibodies (U.S. Pat. No. 4,946,778; Bird, Science 242:423-42 (1988); Huston et al., Proc. Natl. Acad. Sci. USA 85:5879-5883 (1988); and Ward et al., Nature 334:544-54 (1989)) can be adapted to produce single chain antibodies. Single chain antibodies are formed by linking the heavy and light chain fragments of the Fv region via an amino acid bridge, resulting in a single chain polypeptide. Techniques for the assembly of functional Fv fragments in E. coli may also be used (Skerra et al., Science 242:1038-1041 (1988)).

[0190] Recombinant Expression of Antibodies

[0191] Recombinant expression of an antibody, or fragment, derivative or analog thereof, (e.g., a heavy or light chain of an antibody or a single chain antibody), requires construction of an expression vector containing a polynucleotide that encodes the antibody. Once a polynucleotide encoding an antibody molecule or a heavy or light chain of an antibody, or portion thereof (preferably containing the heavy or light chain variable domain), of the invention has been obtained, the vector for the production of the antibody molecule may be produced by recombinant DNA technology using techniques well known in the art. Thus, methods for preparing a protein by expressing a polynucleotide containing an antibody encoding nucleotide sequence are described herein. Methods which are well known to those skilled in the art can be used to construct expression vectors containing antibody coding sequences and appropriate transcriptional and translational control signals. These methods include, for example, in vitro recombinant DNA techniques, synthetic techniques, and in vivo genetic recombination. The invention, thus, provides replic able vectors comprising a nucleotide sequence encoding an antibody molecule of the invention, or a heavy or light chain thereof, or a heavy or light chain variable domain, operably linked to a promoter. Such vectors may include the nucleotide sequence encoding the constant region of the antibody molecule (see, e.g., PCT Publication WO 86/05807; PCT Publication WO 89/01036; and U.S. Pat. No. 5,122,464) and the variable domain of the antibody may be cloned into such a vector for expression of the entire heavy or light chain.

[0192] The expression vector is transferred to a host cell by conventional techniques and the transfected cells are then cultured by conventional techniques to produce an antibody. Thus, the invention includes host cells containing a polynucleotide encoding an antibody of the invention, or a heavy or light chain thereof, or a single chain antibody, operably linked to a heterologous promoter. In preferred embodiments for the expression of double-chained antibodies, vectors encoding both the heavy and light chains may be co-expressed in the host cell for expression of the entire immunoglobulin molecule, as detailed below.

[0193] A variety of host-expression vector systems may be utilized to express the antibody molecules of the invention. Such host-expression systems represent vehicles by which the coding sequences of interest may be produced and subsequently purified, but also represent cells which may, when transformed or transfected with the appropriate nucleotide coding sequences, express an antibody molecule of the invention in situ. These include but are not limited to microorganisms such as bacteria (e.g., E. coli, B. subtilis) transformed with recombinant bacteriophage DNA, plasmid DNA or cosmid DNA expression vectors containing antibody coding sequences; yeast (e.g., Saccharomyces, Pichia) transformed with recombinant yeast expression vectors containing antibody coding sequences; insect cell systems infected with recombinant virus expression vectors (e.g., baculovirus) containing antibody coding sequences; plant cell systems infected with recombinant virus expression vectors (e.g., cauliflower mosaic virus, CaMV; tobacco mosaic virus, TMV) or transformed with recombinant plasmid expression vectors (e.g., Ti plasmid) containing antibody coding sequences; or mammalian cell systems (e.g., COS, CHO, BHK, 293, 3T3 cells) harboring recombinant expression constructs containing promoters derived from the genome of mammalian cells (e.g., metallothionein promoter) or from mammalian viruses (e.g., the adenovirus late promoter; the vaccinia virus 7.5K promoter). Preferably, bacterial cells such as Escherichia coli, and more preferably, eukaryotic cells, especially for the expression of whole recombinant antibody molecule, are used for the expression of a recombinant antibody molecule. For example, mammalian cells such as Chinese hamster ovary cells (CHO), in conjunction with a vector such as the major intermediate early gene promoter element from human cytomegalovirus is an effective expression system for antibodies (Foecking et al., Gene 45:101 (1986); Cockett et al., Bio/Technology 8:2 (1990)).

[0194] In bacterial systems, a number of expression vectors may be advantageously selected depending upon the use intended for the antibody molecule being expressed. For example, when a large quantity of such a protein is to be produced, for the generation of pharmaceutical compositions of an antibody molecule, vectors which direct the expression of high levels of fusion protein products that are readily purified may be desirable. Such vectors include, but are not limited, to the E. coli expression vector pUR278 (Ruther et al., EMBO J. 2:1791 (1983)), in which the antibody coding sequence may be ligated individually into the vector in frame with the lac Z coding region so that a fusion protein is produced; pIN vectors (Inouye & Inouye, Nucleic Acids Res. 13:3101-3109 (1985); Van Heeke & Schuster, J. Biol. Chem. 24:5503-5509 (1989)); and the like. pGEX vectors may also be used to express foreign polypeptides as fusion proteins with glutathione S-transferase (GST). In general, such fusion proteins are soluble and can easily be purified from lysed cells by adsorption and binding to matrix glutathione-agarose beads followed by elution in the presence of free glutathione. The pGEX vectors are designed to include thrombin or factor Xa protease cleavage sites so that the cloned target gene product can be released from the GST moiety.

[0195] In an insect system, Autographa californica nuclear polyhedrosis virus (AcNPV) is used as a vector to express foreign genes. The virus grows in Spodoptera frugiperda cells. The antibody coding sequence may be cloned individually into non-essential regions (for example the polyhedrin gene) of the virus and placed under control of an AcNPV promoter (for example the polyhedrin promoter).

[0196] In mammalian host cells, a number of viral-based expression systems may be utilized. In cases where an adenovirus is used as an expression vector, the antibody coding sequence of interest may be ligated to an adenovirus transcription/translation control complex, e.g., the late promoter and tripartite leader sequence. This chimeric gene may then be inserted in the adenovirus genome by in vitro or in vivo recombination. Insertion in a non-essential region of the viral genome (e.g., region E1 or E3) will result in a recombinant virus that is viable and capable of expressing the antibody molecule in infected hosts. (e.g., see Logan & Shenk, Proc. Natl. Acad. Sci. USA 81:355-359 (1984)). Specific initiation signals may also be required for efficient translation of inserted antibody coding sequences. These signals include the ATG initiation codon and adjacent sequences. Furthermore, the initiation codon must be in phase with the reading frame of the desired coding sequence to ensure translation of the entire insert. These exogenous translational control signals and initiation codons can be of a variety of origins, both natural and synthetic. The efficiency of expression may be enhanced by the inclusion of appropriate transcription enhancer elements, transcription terminators, etc. (see Bittner et al., Methods in Enzymol. 153:51-544 (1987)).

[0197] In addition, a host cell strain may be chosen which modulates the expression of the inserted sequences, or modifies and processes the gene product in the specific fashion desired. Such modifications (e.g., glycosylation) and processing (e.g., cleavage) of protein products may be important for the function of the protein. Different host cells have characteristic and specific mechanisms for the post-translational processing and modification of proteins and gene products. Appropriate cell lines or host systems can be chosen to ensure the correct modification and processing of the foreign protein expressed. To this end, eukaryotic host cells which possess the cellular machinery for proper processing of the primary transcript, glycosylation, and phosphorylation of the gene product may be used. Such mammalian host cells include but are not limited to CHO, VERY, BHK, Hela, COS, MDCK, 293, 3T3, W138, and in particular, breast cancer cell lines such as, for example, BT483, Hs578T, HTB2, BT20 and T470, and normal mammary gland cell line such as, for example, CRL7030 and Hs578Bst.

[0198] For long-term, high-yield production of recombinant proteins, stable expression is preferred. For example, cell lines which stably express the antibody molecule may be engineered. Rather than using expression vectors which contain viral origins of replication, host cells can be transformed with DNA controlled by appropriate expression control elements (e.g., promoter, enhancer, sequences, transcription terminators, polyadenylation sites, etc.), and a selectable marker. Following the introduction of the foreign DNA, engineered cells may be allowed to grow for 1-2 days in an enriched media, and then are switched to a selective media. The selectable marker in the recombinant plasmid confers resistance to the selection and allows cells to stably integrate the plasmid into their chromosomes and grow to form foci which in turn can be cloned and expanded into cell lines. This method may advantageously be used to engineer cell lines which express the antibody molecule. Such engineered cell lines may be particularly useful in screening and evaluation of compounds that interact directly or indirectly with the antibody molecule.

[0199] A number of selection systems may be used, including but not limited to the herpes simplex virus thymidine kinase (Wigler et al., Cell 11:223 (1977)), hypoxanthine-guanine phosphoribosyltransferase (Szybalska & Szybalski, Proc. Natl. Acad. Sci. USA 48:202 (1992)), and adenine phosphoribosyltransferase (Lowy et al., Cell 22:817 (1980)) genes can be employed in tk−, hgprt− or aprt− cells, respectively. Also, antimetabolite resistance can be used as the basis of selection for the following genes: dhfr, which confers resistance to methotrexate (Wigler et al., Natl. Acad. Sci. USA 77:357 (1980); O'Hare et al., Proc. Natl. Acad. Sci. USA 78:1527 (1981)); gpt, which confers resistance to mycophenolic acid (Mulligan & Berg, Proc. Natl. Acad. Sci. USA 78:2072 (1981)); neo, which confers resistance to the aminoglycoside G-418 Clinical Pharmacy 12:488-505; Wu and Wu, Biotherapy 3:87-95 (1991); Tolstoshev, Ann. Rev. Pharmacol. Toxicol. 32:573-596 (1993); Mulligan, Science 260:926-932 (1993); and Morgan and Anderson, Ann. Rev. Biochem. 62:191-217 (1993); May, 1993, TIB TECH 11(5):155-215 (1993)); and hygro, which confers resistance to hygromycin (Santerre et al., Gene 30:147 (1984)). Methods commonly known in the art of recombinant DNA technology may be routinely applied to select the desired recombinant clone, and such methods are described, for example, in Ausubel et al. (eds.), Current Protocols in Molecular Biology, John Wiley & Sons, NY (1993); Kriegler, Gene Transfer and Expression, A Laboratory Manual, Stockton Press, NY (1990); and in Chapters 12 and 13, Dracopoli et al. (eds), Current Protocols in Human Genetics, John Wiley & Sons, NY (1994); Colberre-Garapin et al., J. Mol. Biol. 150:1 (1981), which are incorporated by reference herein in their entireties.

[0200] The expression levels of an antibody molecule can be increased by vector amplification (for a review, see Bebbington and Hentschel, The use of vectors based on gene amplification for the expression of cloned genes in mammalian cells in DNA cloning, Vol. 3. (Academic Press, New York, 1987)). When a marker in the vector system expressing antibody is amplifiable, increase in the level of inhibitor present in culture of host cell will increase the number of copies of the marker gene. Since the amplified region is associated with the antibody gene, production of the antibody will also increase (Crouse et al., Mol. Cell. Biol. 3:257 (1983)).

[0201] Vectors which use glutamine synthase (GS) or DHFR as the selectable markers can be amplified in the presence of the drugs methionine sulphoximine or methotrexate, respectively. An advantage of glutamine synthase based vectors are the availabilty of cell lines (e.g., the murine myeloma cell line, NS0) which are glutamine synthase negative. Glutamine synthase expression systems can also function in glutamine synthase expressing cells (e.g. Chinese Hamster Ovary (CHO) cells) by providing additional inhibitor to prevent the functioning of the endogenous gene. A glutamine synthase expression system and components thereof are detailed in PCT publications: WO87/04462; WO86/05807; WO89/01036; WO89/10404; and WO91/06657 which are incorporated in their entireties by reference herein. Additionally, glutamine synthase expression vectors that may be used according to the present invention are commercially available from suppliers, including, for example Lonza Biologics, Inc. (Portsmouth, N.H.). Expression and production of monoclonal antibodies using a GS expression system in murine myeloma cells is described in Bebbington et al., Bio/technology 10:169 (1992) and in Biblia and Robinson Biotechnol. Prog. 11:1 (1995) which are incorporated in their entirities by reference herein.

[0202] The host cell may be co-transfected with two expression vectors of the invention, the first vector encoding a heavy chain derived polypeptide and the second vector encoding a light chain derived polypeptide. The two vectors may contain identical selectable markers which enable equal expression of heavy and light chain polypeptides. Alternatively, a single vector may be used which encodes, and is capable of expressing, both heavy and light chain polypeptides. In such situations, the light chain should be placed before the heavy chain to avoid an excess of toxic free heavy chain (Proudfoot, Nature 322:52 (1986); Kohler, Proc. Natl. Acad. Sci. USA 77:2197 (1980)). The coding sequences for the heavy and light chains may comprise cDNA or genomic DNA.

[0203] Once an antibody molecule of the invention has been produced by an animal, chemically synthesized, or recombinantly expressed, it may be purified by any method known in the art for purification of an immunoglobulin molecule, for example, by chromatography (e.g., ion exchange, affinity, particularly by affinity for the specific antigen after Protein A, and sizing column chromatography), centrifugation, differential solubility, or by any other standard technique for the purification of proteins. In addition, the antibodies that bind to a Therapeutic protein and that may correspond to a Therapeutic protein portion of an albumin fusion protein of the invention or fragments thereof can be fused to heterologous polypeptide sequences described herein or otherwise known in the art, to facilitate purification.

[0204] Modifications of Antibodies

[0205] Antibodies that bind a Therapeutic protein or fragments or variants can be fused to marker sequences, such as a peptide to facilitate purification. In preferred embodiments, the marker amino acid sequence is a hexa-histidine peptide, such as the tag provided in a pQE vector (QIAGEN, Inc., 9259 Eton Avenue, Chatsworth, Calif., 91311), among others, many of which are commercially available. As described in Gentz et al., Proc. Natl. Acad. Sci. USA 86:821-824 (1989), for instance, hexa-histidine provides for convenient purification of the fusion protein. Other peptide tags useful for purification include, but are not limited to, the “HA” tag, which corresponds to an epitope derived from the influenza hemagglutinin protein (Wilson et al., Cell 37:767 (1984)) and the “flag” tag.

[0206] The present invention further encompasses antibodies or fragments thereof conjugated to a diagnostic or therapeutic agent. The antibodies can be used diagnostically to, for example, monitor the development or progression of a tumor as part of a clinical testing procedure to, e.g., determine the efficacy of a given treatment regimen. Detection can be facilitated by coupling the antibody to a detectable substance. Examples of detectable substances include various enzymes, prosthetic groups, fluorescent materials, luminescent materials, bioluminescent materials, radioactive materials, positron emitting metals using various positron emission tomographies, and nonradioactive paramagnetic metal ions. The detectable substance may be coupled or conjugated either directly to the antibody (or fragment thereof) or indirectly, through an intermediate (such as, for example, a linker known in the art) using techniques known in the art. See, for example, U.S. Pat. No. 4,741,900 for metal ions which can be conjugated to antibodies for use as diagnostics according to the present invention. Examples of suitable enzymes include horseradish peroxidase, alkaline phosphatase, beta-galactosidase, or acetylcholinesterase; examples of suitable prosthetic group complexes include streptavidin/biotin and avidin/biotin; examples of suitable fluorescent materials include umbelliferone, fluorescein, fluorescein isothiocyanate, rhodamine, dichlorotriazinylamine fluorescein, dansyl chloride or phycoerythrin; an example of a luminescent material includes luminol; examples of bioluminescent materials include luciferase, luciferin, and aequorin; and examples of suitable radioactive material include 125I, 131I, 111In or 99Tc. Other examples of detectable substances have been described elsewwhere herein.

[0207] Further, an antibody of the invention may be conjugated to a therapeutic moiety such as a cytotoxin, e.g., a cytostatic or cytocidal agent, a therapeutic agent or a radioactive metal ion, e.g., alpha-emitters such as, for example, 213Bi. A cytotoxin or cytotoxic agent includes any agent that is detrimental to cells. Examples include paclitaxol, cytochalasin B, gramicidin D, ethidium bromide, emetine, mitomycin, etoposide, tenoposide, vincristine, vinblastine, colchicin, doxorubicin, daunorubicin, dihydroxy anthracin dione, mitoxantrone, mithramycin, actinomycin D, 1-dehydrotestosterone, glucocorticoids, procaine, tetracaine, lidocaine, propranolol, and puromycin and analogs or homologs thereof. Therapeutic agents include, but are not limited to, antimetabolites (e.g., methotrexate, 6-mercaptopurine, 6-thioguanine, cytarabine, 5-fluorouracil decarbazine), alkylating agents (e.g., mechlorethamine, thioepa chlorambucil, melphalan, carmustine (BSNU) and lomustine (CCNU), cyclothosphamide, busulfan, dibromomannitol, streptozotocin, mitomycin C, and cis-dichlorodiamine platinum (II) (DDP) cisplatin), anthracyclines (e.g., daunorubicin (formerly daunomycin) and doxorubicin), antibiotics (e.g., dactinomycin (formerly actinomycin), bleomycin, mithramycin, and anthramycin (AMC)), and anti-mitotic agents (e.g., vincristine and vinblastine).

[0208] The conjugates of the invention can be used for modifying a given biological response, the therapeutic agent or drug moiety is not to be construed as limited to classical chemical therapeutic agents. For example, the drug moiety may be a protein or polypeptide possessing a desired biological activity. Such proteins may include, for example, a toxin such as abrin, ricin A, pseudomonas exotoxin, or diphtheria toxin; a protein such as tumor necrosis factor, alpha-interferon, β-interferon, nerve growth factor, platelet derived growth factor, tissue plasminogen activator, an apoptotic agent, e.g., TNF-alpha, TNF-beta, AIM I (See, International Publication No. WO 97/33899), AIM II (See, International Publication No. WO 97/34911), Fas Ligand (Takahashi et al., Int. Immunol., 6:1567-1574 (1994)), VEGI (See, International Publication No. WO 99/23105), a thrombotic agent or an anti-angiogenic agent, e.g., angiostatin or endostatin; or, biological response modifiers such as, for example, lymphokines, interleukin-1 (“IL-1”), interleukin-2 (“IL-2”), interleukin-6 (“IL-6”), granulocyte macrophage colony stimulating factor (“GM-CSF”), granulocyte colony stimulating factor (“G-CSF”), or other growth factors.

[0209] Antibodies may also be attached to solid supports, which are particularly useful for immunoassays or purification of the target antigen. Such solid supports include, but are not limited to, glass, cellulose, polyacrylamide, nylon, polystyrene, polyvinyl chloride or polypropylene.

[0210] Techniques for conjugating such therapeutic moiety to antibodies are well known. See, for example, Arnon et al., “Monoclonal Antibodies For Immunotargeting Of Drugs In Cancer Therapy”, in Monoclonal Antibodies And Cancer Therapy, Reisfeld et al. (eds.), pp. 243-56 (Alan R. Liss, Inc. 1985); Hellstrom et al., “Antibodies For Drug Delivery”, in Controlled Drug Delivery (2nd Ed.), Robinson et al. (eds.), pp. 623-53 (Marcel Dekker, Inc. 1987); Thorpe, “Antibody Carriers Of Cytotoxic Agents In Cancer Therapy: A Review”, in Monoclonal Antibodies '84: Biological And Clinical Applications, Pinchera et al. (eds.), pp. 475-506 (1985); “Analysis, Results, And Future Prospective Of The Therapeutic Use Of Radiolabeled Antibody In Cancer Therapy”, in Monoclonal Antibodies For Cancer Detection And Therapy, Baldwin et al. (eds.), pp. 303-16 (Academic Press 1985), and Thorpe et al., “The Preparation And Cytotoxic Properties Of Antibody-Toxin Conjugates”, Immunol. Rev. 62:119-58 (1982).

[0211] Alternatively, an antibody can be conjugated to a second antibody to form an antibody heteroconjugate as described by Segal in U.S. Pat. No. 4,676,980, which is incorporated herein by reference in its entirety.

[0212] An antibody, with or without a therapeutic moiety conjugated to it, administered alone or in combination with cytotoxic factor(s) and/or cytokine(s) can be used as a therapeutic.

[0213] Antibody-Albumin Fusion

[0214] Antibodies that bind to a Therapeutic protein and that may correspond to a Therapeutic protein portion of an albumin fusion protein of the invention include, but are not limited to, antibodies that bind a Therapeutic protein disclosed in the “Therapeutic Protein X” column of Table 1, or a fragment or variant thereof.

[0215] In specific embodiments, the fragment or variant of an antibody that immunospecifcally binds a Therapeutic protein and that corresponds to a Therapeutic protein portion of an albumin fusion protein comprises, or alternatively consists of, the VH domain. In other embodiments, the fragment or variant of an antibody that immunospecifcally binds a Therapeutic protein and that corresponds to a Therapeutic protein portion of an albumin fusion protein comprises, or alternatively consists of, one, two or three VH CDRs. In other embodiments, the fragment or variant of an antibody that immunospecifcally binds a Therapeutic protein and that corresponds to a Therapeutic protein portion of an albumin fusion protein comprises, or alternatively consists of, the VH CDR1. In other embodiments, the fragment or variant of an antibody that immunospecifcally binds a Therapeutic protein and that corresponds to a Therapeutic protein portion of an albumin fusion protein comprises, or alternatively consists of, the VH CDR2. In other embodiments, the fragment or variant of an antibody that immunospecifcally binds a Therapeutic protein and that corresponds to a Therapeutic protein portion of an albumin fusion protein comprises, or alternatively consists of, the VH CDR3.

[0216] In specific embodiments, the fragment or variant of an antibody that immunospecifcally binds a Therapeutic protein and that corresponds to a Therapeutic protein portion of an albumin fusion protein comprises, or alternatively consists of, the VL domain. In other embodiments, the fragment or variant of an antibody that immunospecifcally binds a Therapeutic protein and that corresponds to a Therapeutic protein portion of an albumin fusion protein comprises, or alternatively consists of, one, two or three VL CDRs. In other embodiments, the fragment or variant of an antibody that immunospecifcally binds a Therapeutic protein and that corresponds to a Therapeutic protein portion of an albumin fusion protein comprises, or alternatively consists of, the VL CDR I. In other embodiments, the fragment or variant of an antibody that immunospecifcally binds a Therapeutic protein and that corresponds to a Therapeutic protein portion of an albumin fusion protein comprises, or alternatively consists of, the VL CDR2. In other embodiments, the fragment or variant of an antibody that immunospecifcally binds a Therapeutic protein and that corresponds to a Therapeutic protein portion of an albumin fusion protein comprises, or alternatively consists of, the VL CDR3.

[0217] In other embodiments, the fragment or variant of an antibody that immunospecifcally binds a Therapeutic protein and that corresponds to a Therapeutic protein portion of an albumin fusion protein comprises, or alternatively consists of, one, two, three, four, five, or six VH and/or VL CDRs.

[0218] In preferred embodiments, the fragment or variant of an antibody that immunospecifcally binds a Therapeutic protein and that corresponds to a Therapeutic protein portion of an albumin fusion protein comprises, or alternatively consists of, an scFv comprising the VH domain of the Therapeutic antibody, linked to the VL domain of the therapeutic antibody by a peptide linker such as (Gly₄Ser)₃ (SEQ ID NO:36).

[0219] Immunophenotyping

[0220] The antibodies of the invention or albumin fusion proteins of the invention comprising at least a fragment or variant of an antibody that binds a Therapeutic protein (or fragment or variant thereof) may be utilized for immunophenotyping of cell lines and biological samples. Therapeutic proteins of the present invention may be useful as cell-specific markers, or more specifically as cellular markers that are differentially expressed at various stages of differentiation and/or maturation of particular cell types. Monoclonal antibodies (or albumin fusion proteins comprising at least a fragment or variant of an antibody that binds a Therapeutic protein) directed against a specific epitope, or combination of epitopes, will allow for the screening of cellular populations expressing the marker. Various techniques can be utilized using monoclonal antibodies (or albumin fusion proteins comprising at least a fragment or variant of an antibody that binds a Therapeutic protein) to screen for cellular populations expressing the marker(s), and include magnetic separation using antibody-coated magnetic beads, “panning” with antibody attached to a solid matrix (i.e., plate), and flow cytometry (See, e.g., U.S. Pat. No. 5,985,660; and Morrison et al., Cell, 96:737-49 (1999)).

[0221] These techniques allow for the screening of particular populations of cells, such as might be found with hematological malignancies (i.e. minimal residual disease (MRD) in acute leukemic patients) and “non-self” cells in transplantations to prevent Graft-versus-Host Disease (GVHD). Alternatively, these techniques allow for the screening of hematopoietic stem and progenitor cells capable of undergoing proliferation and/or differentiation, as might be found in human umbilical cord blood.

[0222] Characterizing Antibodies that Bind a Therapeutic Protein and Albumin Fusion Proteins Comprising a Fragment or Variant of an Antibody that Binds a Therapeutic Protein

[0223] The antibodies of the invention or albumin fusion proteins of the invention comprising at least a fragment or variant of an antibody that binds a Therapeutic protein (or fragment or variant thereof) may be characterized in a variety of ways. In particular, Albumin fusion proteins of the invention comprising at least a fragment or variant of an antibody that binds a Therapeutic protein may be assayed for the ability to specifically bind to the same antigens specifically bound by the antibody that binds a Therapeutic protein corresponding to the antibody that binds a Therapeutic protein portion of the albumin fusion protein using techniques described herein or routinely modifying techniques known in the art.

[0224] Assays for the ability of the antibodies of the invention or albumin fusion proteins of the invention comprising at least a fragment or variant of an antibody that binds a Therapeutic protein (or fragment or variant thereof) to (specifically) bind a specific protein or epitope may be performed in solution (e.g., Houghten, Bio/Techniques 13:412-421 (1992)), on beads (e.g., Lam, Nature 354:82-84 (1991)), on chips (e.g., Fodor, Nature 364:555-556 (1993)), on bacteria (e.g., U.S. Pat. No. 5,223,409), on spores (e.g., U.S. Pat. Nos. 5,571,698; 5,403,484; and 5,223,409), on plasmids (e.g., Cull et al., Proc. Natl. Acad. Sci. USA 89:1865-1869 (1992)) or on phage (e.g., Scott and Smith, Science 249:386-390 (1990); Devlin, Science 249:404-406 (1990); Cwirla et al., Proc. Natl. Acad. Sci. USA 87:6378-6382 (1990); and Felici, J. Mol. Biol. 222:301-310 (1991)) (each of these references is incorporated herein in its entirety by reference). The antibodies of the invention or albumin fusion proteins of the invention comprising at least a fragment or variant of an antibody that binds a Therapeutic protein (or fragment or variant thereof) may also be assayed for their specificity and affinity for a specific protein or epitope using or routinely modifying techniques described herein or otherwise known in the art.

[0225] The albumin fusion proteins of the invention comprising at least a fragment or variant of an antibody that binds a Therapeutic protein may be assayed for cross-reactivity with other antigens (e.g., molecules that have sequence/structure conservation with the molecule(s) specifically bound by the antibody that binds a Therapeutic protein (or fragment or variant thereof) corresponding to the Therapeutic protein portion of the albumin fusion protein of the invention) by any method known in the art.

[0226] Immunoassays which can be used to analyze (immunospecific) binding and cross-reactivity include, but are not limited to, competitive and non-competitive assay systems using techniques such as western blots, radioimmunoassays, ELISA (enzyme linked immunosorbent assay), “sandwich” immunoassays, immunoprecipitation assays, precipitin reactions, gel diffusion precipitin reactions, immunodiffusion assays, agglutination assays, complement-fixation assays, immunoradiometric assays, fluorescent immunoassays, and protein A immunoassays, to name but a few. Such assays are routine and well known in the art (see, e.g., Ausubel et al, eds, 1994, Current Protocols in Molecular Biology, Vol. 1, John Wiley & Sons, Inc., New York, which is incorporated by reference herein in its entirety). Exemplary immunoassays are described briefly below (but are not intended by way of limitation).

[0227] Immunoprecipitation protocols generally comprise lysing a population of cells in a lysis buffer such as RIPA buffer (1% NP-40 or Triton X-100, 1% sodium deoxycholate, 0.1% SDS, 0.15 M NaCl, 0.01 M sodium phosphate at pH 7.2, 1% Trasylol) supplemented with protein phosphatase and/or protease inhibitors (e.g., EDTA, PMSF, aprotinin, sodium vanadate), adding an antibody of the invention or albumin fusion protein of the invention comprising at least a fragment or variant of an antibody that binds a Therapeutic protein (or fragment or variant thereof) to the cell lysate, incubating for a period of time (e.g., 1 to 4 hours) at 40 degrees C., adding protein A and/or protein G sepharose beads (or beads coated with an appropriate anti-idiotypic antibody or anti-albumin antibody in the case when an albumin fusion protein comprising at least a fragment or variant of a Therapeutic antibody) to the cell lysate, incubating for about an hour or more at 40 degrees C., washing the beads in lysis buffer and resuspending the beads in SDS/sample buffer. The ability of the antibody or albumin fusion protein of the invention to immunoprecipitate a particular antigen can be assessed by, e.g., western blot analysis. One of skill in the art would be knowledgeable as to the parameters that can be modified to increase the binding of the antibody or albumin fusion protein to an antigen and decrease the background (e.g., pre-clearing the cell lysate with sepharose beads). For further discussion regarding immunoprecipitation protocols see, e.g., Ausubel et al, eds, 1994, Current Protocols in Molecular Biology, Vol. 1, John Wiley & Sons, Inc., New York at 10.16.1.

[0228] Western blot analysis generally comprises preparing protein samples, electrophoresis of the protein samples in a polyacrylamide gel (e.g., 8%-20% SDS-PAGE depending on the molecular weight of the antigen), transferring the protein sample from the polyacrylamide gel to a membrane such as nitrocellulose, PVDF or nylon, blocking the membrane in blocking solution (e.g., PBS with 3% BSA or non-fat milk), washing the membrane in washing buffer (e.g., PBS-Tween 20), applying the antibody or albumin fusion protein of the invention (diluted in blocking buffer) to the membrane, washing the membrane in washing buffer, applying a secondary antibody (which recognizes the albumin fusion protein, e.g., an anti-human serum albumin antibody) conjugated to an enzymatic substrate (e.g., horseradish peroxidase or alkaline phosphatase) or radioactive molecule (e.g., ³²P or ¹²⁵I) diluted in blocking buffer, washing the membrane in wash buffer, and detecting the presence of the antigen. One of skill in the art would be knowledgeable as to the parameters that can be modified to increase the signal detected and to reduce the background noise. For further discussion regarding western blot protocols see, e.g., Ausubel et al, eds, 1994, Current Protocols in Molecular Biology, Vol. 1, John Wiley & Sons, Inc., New York at 10.8.1.

[0229] ELISAs comprise preparing antigen, coating the well of a 96-well microtiter plate with the antigen, washing away antigen that did not bind the wells, adding the antibody or albumin fusion protein (comprising at least a fragment or variant of an antibody that binds a Therapeutic protein) of the invention conjugated to a detectable compound such as an enzymatic substrate (e.g., horseradish peroxidase or alkaline phosphatase) to the wells and incubating for a period of time, washing away unbound or non-specifically bound albumin fusion proteins, and detecting the presence of the antibody or albumin fusion proteins specifically bound to the antigen coating the well. In ELISAs the antibody or albumin fusion protein does not have to be conjugated to a detectable compound; instead, a second antibody (which recognizes the antibody or albumin fusion protein, respectively) conjugated to a detectable compound may be added to the well. Further, instead of coating the well with the antigen, antibody or the albumin fusion protein may be coated to the well. In this case, the detectable molecule could be the antigen conjugated to a detectable compound such as an enzymatic substrate (e.g., horseradish peroxidase or alkaline phosphatase). One of skill in the art would be knowledgeable as to the parameters that can be modified to increase the signal detected as well as other variations of ELISAs known in the art. For further discussion regarding ELISAs see, e.g., Ausubel et al, eds, 1994, Current Protocols in Molecular Biology, Vol. 1, John Wiley & Sons, Inc., New York at 11.2.1.

[0230] The binding affinity of an albumin fusion protein to a protein, antigen, or epitope and the off-rate of an antibody- or albumin fusion protein-protein/antigen/epitope interaction can be determined by competitive binding assays. One example of a competitive binding assay is a radioimmunoassay comprising the incubation of labeled antigen (e.g., ³H or ¹²⁵I) with the antibody or albumin fusion protein of the invention in the presence of increasing amounts of unlabeled antigen, and the detection of the antibody bound to the labeled antigen. The affinity of the antibody or albumin fusion protein of the present invention for a specific protein, antigen, or epitope and the binding off-rates can be determined from the data by Scatchard plot analysis. Competition with a second protein that binds the same protein, antigen or epitope as the antibody or albumin fusion protein, can also be determined using radioimmunoassays. In this case, the protein, antigen or epitope is incubated with an antibody or albumin fusion protein of the present invention conjugated to a labeled compound (e.g., ³H or ¹²⁵I) in the presence of increasing amounts of an unlabeled second protein that binds the same protein, antigen, or epuitope as the albumin fusion protein of the invention.

[0231] In a preferred embodiment, BIAcore kinetic analysis is used to determine the binding on and off rates of antibody or albumin fusion proteins of the invention to a protein, antigen or epitope. BIAcore kinetic analysis comprises analyzing the binding and dissociation of antibodies, albumin fusion proteins, or specific polypeptides, antigens or epitopes from chips with immobilized specific polypeptides, antigens or epitopes, antibodies or albumin fusion proteins, respectively, on their surface.

[0232] Therapeutic Uses

[0233] The present invention is further directed to antibody-based therapies which involve administering antibodies of the invention or albumin fusion proteins of the invention comprising at least a fragment or variant of an antibody that binds a Therapeutic protein to an animal, preferably a mammal, and most preferably a human, patient for treating one or more of the disclosed diseases, disorders, or conditions. Therapeutic compounds of the invention include, but are not limited to, antibodies of the invention (including fragments, analogs and derivatives thereof as described herein), nucleic acids encoding antibodies of the invention (including fragments, analogs and derivatives thereof and anti-idiotypic antibodies as described herein), albumin fusion proteins of the invention comprising at least a fragment or variant of an antibody that binds a Therapeutic protein, and nucleic acids encoding such albumin fusion proteins. The antibodies of the invention or albumin fusion proteins of the invention comprising at least a fragment or variant of an antibody that binds a Therapeutic protein can be used to treat, inhibit or prevent diseases, disorders or conditions associated with aberrant expression and/or activity of a Therapeutic protein, including, but not limited to, any one or more of the diseases, disorders, or conditions described herein. The treatment and/or prevention of diseases, disorders, or conditions associated with aberrant expression and/or activity of a Therapeutic protein includes, but is not limited to, alleviating symptoms associated with those diseases, disorders or conditions. Antibodies of the invention or albumin fusion proteins of the invention comprising at least a fragment or variant of an antibody that binds a Therapeutic protein may be provided in pharmaceutically acceptable compositions as known in the art or as described herein.

[0234] In a specific and preferred embodiment, the present invention is directed to antibody-based therapies which involve administering antibodies of the invention or albumin fusion proteins of the invention comprising at least a fragment or variant of an antibody that binds a Therapeutic protein to an animal, preferably a mammal, and most preferably a human, patient for treating one or more diseases, disorders, or conditions, including but not limited to: neural disorders, immune system disorders, muscular disorders, reproductive disorders, gastrointestinal disorders, pulmonary disorders, cardiovascular disorders, renal disorders, proliferative disorders, and/or cancerous diseases and conditions., and/or as described elsewhere herein. Therapeutic compounds of the invention include, but are not limited to, antibodies of the invention (e.g., antibodies directed to the full length protein expressed on the cell surface of a mammalian cell; antibodies directed to an epitope of a Therapeutic protein and nucleic acids encoding antibodies of the invention (including fragments, analogs and derivatives thereof and anti-idiotypic antibodies as described herein). The antibodies of the invention can be used to treat, inhibit or prevent diseases, disorders or conditions associated with aberrant expression and/or activity of a Therapeutic protein, including, but not limited to, any one or more of the diseases, disorders, or conditions described herein. The treatment and/or prevention of diseases, disorders, or conditions associated with aberrant expression and/or activity of a Therapeutic protein includes, but is not limited to, alleviating symptoms associated with those diseases, disorders or conditions. Antibodies of the invention or albumin fusion proteins of the invention comprising at least a fragment or variant of an antibody that binds a Therapeutic protein may be provided in pharmaceutically acceptable compositions as known in the art or as described herein.

[0235] A summary of the ways in which the antibodies of the invention or albumin fusion proteins of the invention comprising at least a fragment or variant of an antibody that binds a Therapeutic protein may be used therapeutically includes binding Therapeutic proteins locally or systemically in the body or by direct cytotoxicity of the antibody, e.g. as mediated by complement (CDC) or by effector cells (ADCC). Some of these approaches are described in more detail below. Armed with the teachings provided herein, one of ordinary skill in the art will know how to use the antibodies of the invention or albumin fusion proteins of the invention comprising at least a fragment or variant of an antibody that binds a Therapeutic protein for diagnostic, monitoring or therapeutic purposes without undue experimentation.

[0236] The antibodies of the invention or albumin fusion proteins of the invention comprising at least a fragment or variant of an antibody that binds a Therapeutic protein may be advantageously utilized in combination with other monoclonal or chimeric antibodies, or with lymphokines or hematopoietic growth factors (such as, e.g., IL-2, IL-3 and IL-7), for example, which serve to increase the number or activity of effector cells which interact with the antibodies.

[0237] The antibodies of the invention or albumin fusion proteins of the invention comprising at least a fragment or variant of an antibody that binds a Therapeutic protein may be administered alone or in combination with other types of treatments (e.g., radiation therapy, chemotherapy, hormonal therapy, immunotherapy and anti-tumor agents). Generally, administration of products of a species origin or species reactivity (in the case of antibodies) that is the same species as that of the patient is preferred. Thus, in a preferred embodiment, human antibodies, fragments derivatives, analogs, or nucleic acids, are administered to a human patient for therapy or prophylaxis.

[0238] It is preferred to use high affinity and/or potent in vivo inhibiting and/or neutralizing antibodies against Therapeutic proteins, fragments or regions thereof, (or the albumin fusion protein correlate of such an antibody) for both immunoassays directed to and therapy of disorders related to polynucleotides or polypeptides, including fragments thereof, of the present invention. Such antibodies, fragments, or regions, will preferably have an affinity for polynucleotides or polypeptides of the invention, including fragments thereof. Preferred binding affinities include dissociation constants or Kd's less than 5×10⁻² M, 10⁻² M, 5×10⁻³ M, 10⁻³ M, 5×10⁻⁴ M, 10⁻⁴ M. More preferred binding affinities include those with a dissociation constant or Kd less than 5×10⁻⁵ M, 10⁻⁵ M, 5×10⁻⁶ M, 10⁻⁶M, 5×10⁻⁷ M, 10⁷ M, 5×10⁻⁸ M or 10⁻⁸ M. Even more preferred binding affinities include those with a dissociation constant or Kd less than 5×10⁻⁹ M, 10⁻⁹ M, 5×10⁻¹⁰ M, 10⁻¹⁰ M, 5×10⁻¹¹ M, 10⁻¹¹ M, 5×10⁻¹² M, ¹⁰⁻¹² M, 5×10⁻¹³ M, 10⁻¹³ M, 5×10⁻¹⁴ M, 10⁻¹⁴ M, 5×10⁻¹⁵ M, or 10⁻¹⁵ M.

[0239] Gene Therapy

[0240] In a specific embodiment, nucleic acids comprising sequences encoding antibodies that bind therapeutic proteins or albumin fusion proteins comprising at least a fragment or variant of an antibody that binds a Therapeutic protein are administered to treat, inhibit or prevent a disease or disorder associated with aberrant expression and/or activity of a Therapeutic protein, by way of gene therapy. Gene therapy refers to therapy performed by the administration to a subject of an expressed or expressible nucleic acid. In this embodiment of the invention, the nucleic acids produce their encoded protein that mediates a therapeutic effect.

[0241] Any of the methods for gene therapy available in the art can be used according to the present invention. Exemplary methods are described in more detail elsewhere in this application.

[0242] Demonstration of Therapeutic or Prophylactic Activity

[0243] The compounds or pharmaceutical compositions of the invention are preferably tested in vitro, and then in vivo for the desired therapeutic or prophylactic activity, prior to use in humans. For example, in vitro assays to demonstrate the therapeutic or prophylactic utility of a compound or pharmaceutical composition include, the effect of a compound on a cell line or a patient tissue sample. The effect of the compound or composition on the cell line and/or tissue sample can be determined utilizing techniques known to those of skill in the art including, but not limited to, rosette formation assays and cell lysis assays. In accordance with the invention, in vitro assays which can be used to determine whether administration of a specific compound is indicated, include in vitro cell culture assays in which a patient tissue sample is grown in culture, and exposed to or otherwise administered a compound, and the effect of such compound upon the tissue sample is observed.

[0244] Therapeutic/Prophylactic Administration and Composition

[0245] The invention provides methods of treatment, inhibition and prophylaxis by administration to a subject of an effective amount of a compound or pharmaceutical composition of the invention, preferably an antibody. In a preferred embodiment, the compound is substantially purified (e.g., substantially free from substances that limit its effect or produce undesired side-effects). The subject is preferably an animal, including but not limited to animals such as cows, pigs, horses, chickens, cats, dogs, etc., and is preferably a mammal, and most preferably human.

[0246] Formulations and methods of administration that can be employed when the compound comprises a nucleic acid or an immunoglobulin are described above; additional appropriate formulations and routes of administration can be selected from among those described herein below.

[0247] Various delivery systems are known and can be used to administer a compound of the invention, e.g., encapsulation in liposomes, microparticles, microcapsules, recombinant cells capable of expressing the compound, receptor-mediated endocytosis (see, e.g., Wu and Wu, J. Biol. Chem. 262:4429-4432 (1987)), construction of a nucleic acid as part of a retroviral or other vector, etc. Methods of introduction include but are not limited to intradermal, intramuscular, intraperitoneal, intravenous, subcutaneous, intranasal, epidural, and oral routes. The compounds or compositions may be administered by any convenient route, for example by infusion or bolus injection, by absorption through epithelial or mucocutaneous linings (e.g., oral mucosa, rectal and intestinal mucosa, etc.) and may be administered together with other biologically active agents. Administration can be systemic or local. In addition, it may be desirable to introduce the pharmaceutical compounds or compositions of the invention into the central nervous system by any suitable route, including intraventricular and intrathecal injection; intraventricular injection may be facilitated by an intraventricular catheter, for example, attached to a reservoir, such as an Ommaya reservoir. Pulmonary administration can also be employed, e.g., by use of an inhaler or nebulizer, and formulation with an aerosolizing agent.

[0248] In a specific embodiment, it may be desirable to administer the pharmaceutical compounds or compositions of the invention locally to the area in need of treatment; this may be achieved by, for example, and not by way of limitation, local infusion during surgery, topical application, e.g., in conjunction with a wound dressing after surgery, by injection, by means of a catheter, by means of a suppository, or by means of an implant, said implant being of a porous, non-porous, or gelatinous material, including membranes, such as sialastic membranes, or fibers. Preferably, when administering a protein, including an antibody, of the invention, care must be taken to use materials to which the protein does not absorb.

[0249] In another embodiment, the compound or composition can be delivered in a vesicle, in particular a liposome (see Langer, Science 249:1527-1533 (1990); Treat et al., in Liposomes in the Therapy of Infectious Disease and Cancer, Lopez-Berestein and Fidler (eds.), Liss, New York, pp. 353-365 (1989); Lopez-Berestein, ibid., pp. 317-327; see generally ibid.)

[0250] In yet another embodiment, the compound or composition can be delivered in a controlled release system. In one embodiment, a pump may be used (see Langer, supra; Sefton, CRC Crit. Ref. Biomed. Eng. 14:201 (1987); Buchwald et al., Surgery 88:507 (1980); Saudek et al., N. Engl. J. Med. 321:574 (1989)). In another embodiment, polymeric materials can be used (see Medical Applications of Controlled Release, Langer and Wise (eds.), CRC Pres., Boca Raton, Fla. (1974); Controlled Drug Bioavailability, Drug Product Design and Performance, Smolen and Ball (eds.), Wiley, New York (1984); Ranger and Peppas, J., Macromol. Sci. Rev. Macromol. Chem. 23:61 (1983); see also Levy et al., Science 228:190 (1985); During et al., Ann. Neurol. 25:351 (1989); Howard et al., J. Neurosurg. 71:105 (1989)). In yet another embodiment, a controlled release system can be placed in proximity of the therapeutic target, e.g., the brain, thus requiring only a fraction of the systemic dose (see, e.g., Goodson, in Medical Applications of Controlled Release, supra, vol. 2, pp. 115-138 (1984)).

[0251] Other controlled release systems are discussed in the review by Langer (Science 249:1527-1533 (1990)).

[0252] In a specific embodiment where the compound of the invention is a nucleic acid encoding a protein, the nucleic acid can be administered in vivo to promote expression of its encoded protein, by constructing it as part of an appropriate nucleic acid expression vector and administering it so that it becomes intracellular, e.g., by use of a retroviral vector (see U.S. Pat. No. 4,980,286), or by direct injection, or by use of microparticle bombardment (e.g., a gene gun; Biolistic, Dupont), or coating with lipids or cell-surface receptors or transfecting agents, or by administering it in linkage to a homeobox-like peptide which is known to enter the nucleus (see e.g., Joliot et al., Proc. Natl. Acad. Sci. USA 88:1864-1868 (1991)), etc. Alternatively, a nucleic acid can be introduced intracellularly and incorporated within host cell DNA for expression, by homologous recombination.

[0253] The present invention also provides pharmaceutical compositions. Such compositions comprise a therapeutically effective amount of a compound, and a pharmaceutically acceptable carrier. In a specific embodiment, the term “pharmaceutically acceptable” means approved by a regulatory agency of the Federal or a state government or listed in the U.S. Pharmacopeia or other generally recognized pharmacopeia for use in animals, and more particularly in humans. The term “carrier” refers to a diluent, adjuvant, excipient, or vehicle with which the therapeutic is administered. Such pharmaceutical carriers can be sterile liquids, such as water and oils, including those of petroleum, animal, vegetable or synthetic origin, such as peanut oil, soybean oil, mineral oil, sesame oil and the like. Water is a preferred carrier when the pharmaceutical composition is administered intravenously. Saline solutions and aqueous dextrose and glycerol solutions can also be employed as liquid carriers, particularly for injectable solutions. Suitable pharmaceutical excipients include starch, glucose, lactose, sucrose, gelatin, malt, rice, flour, chalk, silica gel, sodium stearate, glycerol monostearate, talc, sodium chloride, dried skim milk, glycerol, propylene, glycol, water, ethanol and the like. The composition, if desired, can also contain minor amounts of wetting or emulsifying agents, or pH buffering agents. These compositions can take the form of solutions, suspensions, emulsion, tablets, pills, capsules, powders, sustained-release formulations and the like. The composition can be formulated as a suppository, with traditional binders and carriers such as triglycerides. Oral formulation can include standard carriers such as pharmaceutical grades of mannitol, lactose, starch, magnesium stearate, sodium saccharine, cellulose, magnesium carbonate, etc. Examples of suitable pharmaceutical carriers are described in “Remington's Pharmaceutical Sciences” by E. W. Martin. Such compositions will contain a therapeutically effective amount of the compound, preferably in purified form, together with a suitable amount of carrier so as to provide the form for proper administration to the patient. The formulation should suit the mode of administration.

[0254] In a preferred embodiment, the composition is formulated in accordance with routine procedures as a pharmaceutical composition adapted for intravenous administration to human beings. Typically, compositions for intravenous administration are solutions in sterile isotonic aqueous buffer. Where necessary, the composition may also include a solubilizing agent and a local anesthetic such as lignocaine to ease pain at the site of the injection. Generally, the ingredients are supplied either separately or mixed together in unit dosage form, for example, as a dry lyophilized powder or water free concentrate in a hermetically sealed container such as an ampoule or sachette indicating the quantity of active agent. Where the composition is to be administered by infusion, it can be dispensed with an infusion bottle containing sterile pharmaceutical grade water or saline. Where the composition is administered by injection, an ampoule of sterile water for injection or saline can be provided so that the ingredients may be mixed prior to administration.

[0255] The compounds of the invention can be formulated as neutral or salt forms. Pharmaceutically acceptable salts include those formed with anions such as those derived from hydrochloric, phosphoric, acetic, oxalic, tartaric acids, etc., and those formed with cations such as those derived from sodium, potassium, ammonium, calcium, ferric hydroxides, isopropylamine, triethylamine, 2-ethylamino ethanol, histidine, procaine, etc.

[0256] The amount of the compound of the invention which will be effective in the treatment, inhibition and prevention of a disease or disorder associated with aberrant expression and/or activity of a Therapeutic protein can be determined by standard clinical techniques. In addition, in vitro assays may optionally be employed to help identify optimal dosage ranges. The precise dose to be employed in the formulation will also depend on the route of administration, and the seriousness of the disease or disorder, and should be decided according to the judgment of the practitioner and each patient's circumstances. Effective doses may be extrapolated from dose-response curves derived from in vitro or animal model test systems.

[0257] For antibodies, the dosage administered to a patient is typically 0.1 mg/kg to 100 mg/kg of the patient's body weight. Preferably, the dosage administered to a patient is between 0.1 mg/kg and 20 mg/kg of the patient's body weight, more preferably 1 mg/kg to 10 mg/kg of the patient's body weight. Generally, human antibodies have a longer half-life within the human body than antibodies from other species due to the immune response to the foreign polypeptides. Thus, lower dosages of human antibodies and less frequent administration is often possible. Further, the dosage and frequency of administration of antibodies of the invention may be reduced by enhancing uptake and tissue penetration (e.g., into the brain) of the antibodies by modifications such as, for example, lipidation.

[0258] Diagnosis and Imaging

[0259] Labeled antibodies and derivatives and analogs thereof that bind a Therapeutic protein (or fragment or variant thereof) (including albumin fusion proteins comprising at least a fragment or variant of an antibody that binds a Therapeutic protein), can be used for diagnostic purposes to detect, diagnose, or monitor diseases, disorders, and/or conditions associated with the aberrant expression and/or activity of Therapeutic protein. The invention provides for the detection of aberrant expression of a Therapeutic protein, comprising (a) assaying the expression of the Therapeutic protein in cells or body fluid of an individual using one or more antibodies specific to the polypeptide interest and (b) comparing the level of gene expression with a standard gene expression level, whereby an increase or decrease in the assayed Therapeutic protein expression level compared to the standard expression level is indicative of aberrant expression.

[0260] The invention provides a diagnostic assay for diagnosing a disorder, comprising (a) assaying the expression of the Therapeutic protein in cells or body fluid of an individual using one or more antibodies specific to the Therapeutic protein or albumin fusion proteins comprising at least a fragment of variant of an antibody specific to a Therapeutic protein, and (b) comparing the level of gene expression with a standard gene expression level, whereby an increase or decrease in the assayed Therapeutic protein gene expression level compared to the standard expression level is indicative of a particular disorder. With respect to cancer, the presence of a relatively high amount of transcript in biopsied tissue from an individual may indicate a predisposition for the development of the disease, or may provide a means for detecting the disease prior to the appearance of actual clinical symptoms. A more definitive diagnosis of this type may allow health professionals to employ preventative measures or aggressive treatment earlier thereby preventing the development or further progression of the cancer.

[0261] Antibodies of the invention or albumin fusion proteins comprising at least a fragment of variant of an antibody specific to a Therapeutic protein can be used to assay protein levels in a biological sample using classical immunohistological methods known to those of skill in the art (e.g., see Jalkanen et al., J. Cell. Biol. 101:976-985 (1985); Jalkanen et al., J. Cell. Biol. 105:3087-3096 (1987)). Other antibody-based methods useful for detecting protein gene expression include immunoassays, such as the enzyme linked immunosorbent assay (ELISA) and the radioimmunoassay (RIA). Suitable antibody assay labels are known in the art and include enzyme labels, such as, glucose oxidase; radioisotopes, such as iodine (125I, 121I), carbon (14C), sulfur (35S), tritium (3H), indium (112In), and technetium (99Tc); luminescent labels, such as luminol; and fluorescent labels, such as fluorescein and rhodamine, and biotin.

[0262] One facet of the invention is the detection and diagnosis of a disease or disorder associated with aberrant expression of a Therapeutic protein in an animal, preferably a mammal and most preferably a human. In one embodiment, diagnosis comprises: a) administering (for example, parenterally, subcutaneously, or intraperitoneally) to a subject an effective amount of a labeled molecule which specifically binds to the polypeptide of interest; b) waiting for a time interval following the administering for permitting the labeled molecule to preferentially concentrate at sites in the subject where the Therapeutic protein is expressed (and for unbound labeled molecule to be cleared to background level); c) determining background level; and d) detecting the labeled molecule in the subject, such that detection of labeled molecule above the background level indicates that the subject has a particular disease or disorder associated with aberrant expression of the therapeutic protein. Background level can be determined by various methods including, comparing the amount of labeled molecule detected to a standard value previously determined for a particular system.

[0263] It will be understood in the art that the size of the subject and the imaging system used will determine the quantity of imaging moiety needed to produce diagnostic images. In the case of a radioisotope moiety, for a human subject, the quantity of radioactivity injected will normally range from about 5 to 20 millicuries of 99 mTc. The labeled antibody, antibody fragment, or albumin fusion protein comprising at least a fragement or variant of an antibody that binds a Therapeutic protein will then preferentially accumulate at the location of cells which contain the specific Therapeutic protein. In vivo tumor imaging is described in S. W. Burchiel et al., “Immunopharmacokinetics of Radiolabeled Antibodies and Their Fragments.” (Chapter 13 in Tumor Imaging: The Radiochemical Detection of Cancer, S. W. Burchiel and B. A. Rhodes, eds., Masson Publishing Inc. (1982)).

[0264] Depending on several variables, including the type of label used and the mode of administration, the time interval following the administration for permitting the labeled molecule to preferentially concentrate at sites in the subject and for unbound labeled molecule to be cleared to background level is 6 to 48 hours or 6 to 24 hours or 6 to 12 hours. In another embodiment the time interval following administration is 5 to 20 days or 5 to 10 days.

[0265] In an embodiment, monitoring of the disease or disorder is carried out by repeating the method for diagnosing the disease or disease, for example, one month after initial diagnosis, six months after initial diagnosis, one year after initial diagnosis, etc.

[0266] Presence of the labeled molecule can be detected in the patient using methods known in the art for in vivo scanning. These methods depend upon the type of label used. Skilled artisans will be able to determine the appropriate method for detecting a particular label. Methods and devices that may be used in the diagnostic methods of the invention include, but are not limited to, computed tomography (CT), whole body scan such as position emission tomography (PET), magnetic resonance imaging (MRI), and sonography.

[0267] In a specific embodiment, the molecule is labeled with a radioisotope and is detected in the patient using a radiation responsive surgical instrument (Thurston et al., U.S. Pat. No. 5,441,050). In another embodiment, the molecule is labeled with a fluorescent compound and is detected in the patient using a fluorescence responsive scanning instrument. In another embodiment, the molecule is labeled with a positron emitting metal and is detected in the patent using positron emission-tomography. In yet another embodiment, the molecule is labeled with a paramagnetic label and is detected in a patient using magnetic resonance imaging (MRI).

[0268] Kits

[0269] The present invention provides kits that can be used in the above methods. In one embodiment, a kit comprises an antibody, preferably a purified antibody, in one or more containers. In a specific embodiment, the kits of the present invention contain a substantially isolated polypeptide comprising an epitope which is specifically immunoreactive with an antibody included in the kit. Preferably, the kits of the present invention further comprise a control antibody which does not react with the polypeptide of interest. In another specific embodiment, the kits of the present invention contain a means for detecting the binding of an antibody to a polypeptide of interest (e.g., the antibody may be conjugated to a detectable substrate such as a fluorescent compound, an enzymatic substrate, a radioactive compound or a luminescent compound, or a second antibody which recognizes the first antibody may be conjugated to a detectable substrate).

[0270] In another specific embodiment of the present invention, the kit is a diagnostic kit for use in screening serum containing antibodies specific against proliferative and/or cancerous polynucleotides and polypeptides. Such a kit may include a control antibody that does not react with the polypeptide of interest. Such a kit may include a substantially isolated polypeptide antigen comprising an epitope which is specifically immunoreactive with at least one anti-polypeptide antigen antibody. Further, such a kit includes means for detecting the binding of said antibody to the antigen (e.g., the antibody may be conjugated to a fluorescent compound such as fluorescein or rhodamine which can be detected by flow cytometry). In specific embodiments, the kit may include a recombinantly produced or chemically synthesized polypeptide antigen. The polypeptide antigen of the kit may also be attached to a solid support.

[0271] In a more specific embodiment the detecting means of the above-described kit includes a solid support to which said polypeptide antigen is attached. Such a kit may also include a non-attached reporter-labeled anti-human antibody. In this embodiment, binding of the antibody to the polypeptide antigen can be detected by binding of the said reporter-labeled antibody.

[0272] In an additional embodiment, the invention includes a diagnostic kit for use in screening serum containing antigens of the polypeptide of the invention. The diagnostic kit includes a substantially isolated antibody specifically immunoreactive with polypeptide or polynucleotide antigens, and means for detecting the binding of the polynucleotide or polypeptide antigen to the antibody. In one embodiment, the antibody is attached to a solid support. In a specific embodiment, the antibody may be a monoclonal antibody. The detecting means of the kit may include a second, labeled monoclonal antibody. Alternatively, or in addition, the detecting means may include a labeled, competing antigen.

[0273] In one diagnostic configuration, test serum is reacted with a solid phase reagent having a surface-bound antigen obtained by the methods of the present invention. After binding with specific antigen antibody to the reagent and removing unbound serum components by washing, the reagent is reacted with reporter-labeled anti-human antibody to bind reporter to the reagent in proportion to the amount of bound anti-antigen antibody on the solid support. The reagent is again washed to remove unbound labeled antibody, and the amount of reporter associated with the reagent is determined. Typically, the reporter is an enzyme which is detected by incubating the solid phase in the presence of a suitable fluorometric, luminescent or colorimetric substrate (Sigma, St. Louis, Mo.).

[0274] The solid surface reagent in the above assay is prepared by known techniques for attaching protein material to solid support material, such as polymeric beads, dip sticks, 96-well plate or filter material. These attachment methods generally include non-specific adsorption of the protein to the support or covalent attachment of the protein, typically through a free amine group, to a chemically reactive group on the solid support, such as an activated carboxyl, hydroxyl, or aldehyde group. Alternatively, streptavidin coated plates can be used in conjunction with biotinylated antigen(s).

[0275] Thus, the invention provides an assay system or kit for carrying out this diagnostic method. The kit generally includes a support with surface-bound recombinant antigens, and a reporter-labeled anti-human antibody for detecting surface-bound anti-antigen antibody.

[0276] Albumin Fusion Proteins

[0277] The present invention relates generally to albumin fusion proteins and methods of treating, preventing, or ameliorating diseases or disorders. As used herein, “albumin fusion protein” refers to a protein formed by the fusion of at least one molecule of albumin (or a fragment or variant thereof) to at least one molecule of a Therapeutic protein (or fragment or variant thereof). An albumin fusion protein of the invention comprises at least a fragment or variant of a Therapeutic protein and at least a fragment or variant of human serum albumin, which are associated with one another, preferably by genetic fusion (i.e., the albumin fusion protein is generated by translation of a nucleic acid in which a polynucleotide encoding all or a portion of a Therapeutic protein is joined in-frame with a polynucleotide encoding all or a portion of albumin) or chemical conjugation to one another. The Therapeutic protein and albumin protein, once part of the albumin fusion protein, may be referred to as a “portion”, “region” or “moiety” of the albumin fusion protein.

[0278] In one embodiment, the invention provides an albumin fusion protein comprising, or alternatively consisting of, a Therapeutic protein (e.g., as described in Table 1) and a serum albumin protein. In other embodiments, the invention provides an albumin fusion protein comprising, or alternatively consisting of, a biologically active and/or therapeutically active fragment of a Therapeutic protein and a serum albumin protein. In other embodiments, the invention provides an albumin fusion protein comprising, or alternatively consisting of, a biologically active and/or therapeutically active variant of a Therapeutic protein and a serum albumin protein. In preferred embodiments, the serum albumin protein component of the albumin fusion protein is the mature portion of serum albumin.

[0279] In further embodiments, the invention provides an albumin fusion protein comprising, or alternatively consisting of, a Therapeutic protein, and a biologically active and/or therapeutically active fragment of serum albumin. In further embodiments, the invention provides an albumin fusion protein comprising, or alternatively consisting of, a Therapeutic protein and a biologically active and/or therapeutically active variant of serum albumin. In preferred embodiments, the Therapeutic protein portion of the albumin fusion protein is the mature portion of the Therapeutic protein.

[0280] In further embodiments, the invention provides an albumin fusion protein comprising, or alternatively consisting of, a biologically active and/or therapeutically active fragment or variant of a Therapeutic protein and a biologically active and/or therapeutically active fragment or variant of serum albumin. In preferred embodiments, the invention provides an albumin fusion protein comprising, or alternatively consisting of, the mature portion of a Therapeutic protein and the mature portion of serum albumin.

[0281] Preferably, the albumin fusion protein comprises HA as the N-terminal portion, and a Therapeutic protein as the C-terminal portion. Alternatively, an albumin fusion protein comprising HA as the C-terminal portion, and a Therapeutic protein as the N-terminal portion may also be used.

[0282] In other embodiments, the albumin fusion protein has a Therapeutic protein fused to both the N-terminus and the C-terminus of albumin. In a preferred embodiment, the Therapeutic proteins fused at the N- and C-termini are the same Therapeutic proteins. In a preferred embodiment, the Therapeutic proteins fused at the N- and C-termini are different Therapeutic proteins. In another preferred embodiment, the Therapeutic proteins fused at the N- and C-termini are different Therapeutic proteins which may be used to treat or prevent the same disease, disorder, or condition (e.g. as listed in the “Preferred Indication Y” column of Table 1). In another preferred embodiment, the Therapeutic proteins fused at the N- and C-termini are different Therapeutic proteins which may be used to treat or prevent diseases or disorders (e.g. as listed in the “Preferred Indication Y” column of Table 1) which are known in the art to commonly occur in patients simultaneously.

[0283] In addition to albumin fusion protein in which the albumin portion is fused N-terminal and/or C-terminal of the Therapeutic protein portion, albumin fusion proteins of the invention may also be produced by inserting the Therapeutic protein or peptide of interest (e.g., a Therapeutic protein X as diclosed in Table 1, or an antibody that binds a Therapeutic protein or a fragment or variant thereof) into an internal region of HA. For instance, within the protein sequence of the HA molecule a number of loops or turns exist between the end and beginning of α-helices, which are stabilized by disulphide bonds (see FIGS. 9-11). The loops, as determined from the crystal structure of HA (FIG. 13) (PDB identifiers 1AO6, 1BJ5, 1BKE, 1BM0, 1E7E to 1E7I and 1UOR) for the most part extend away from the body of the molecule. These loops are useful for the insertion, or internal fusion, of therapeutically active peptides, particularly those requiring a secondary structure to be functional, or Therapeutic proteins, to essentially generate an albumin molecule with specific biological activity.

[0284] Loops in human albumin structure into which peptides or polypeptides may be inserted to generate albumin fusion proteins of the invention include: Val54-Asn61, Thr76-Asp89, Ala92-Glu100, Gln170-Ala176, His 247-Glu252, Glu 266-Glu277, Glu 280-His288, Ala362-Glu368, Lys439-Pro447, Val462-Lys475, Thr478-Pro486, and Lys560-Thr566. In more preferred embodiments, peptides or polypeptides are inserted into the Val54-Asn61, Gln170-Ala176, and/or Lys560-Thr566 loops of mature human albumin (SEQ ID NO:18).

[0285] Peptides to be inserted may be derived from either phage display or synthetic peptide libraries screened for specific biological activity or from the active portions of a molecule with the desired function. Additionally, random peptide libraries may be generated within particular loops or by insertions of randomized peptides into particular loops of the HA molecule and in which all possible combinations of amino acids are represented.

[0286] Such library(s) could be generated on HA or domain fragments of HA by one of the following methods: (a) randomized mutation of amino acids within one or more peptide loops of HA or HA domain fragments. Either one, more or all the residues within a loop could be mutated in this manner (for example see FIG. 10a); (b) replacement of, or insertion into one or more loops of HA or HA domain fragments (i.e., internal fusion) of a randomized peptide(s) of length Xₙ (where X is an amino acid and n is the number of residues (for example see FIG. 10b); (c) N-, C- or N- and C-terminal peptide/protein fusions in addition to (a) and/or (b).

[0287] The HA or HA domain fragment may also be made multifunctional by grafting the peptides derived from different screens of different loops against different targets into the same HA or HA domain fragment.

[0288] In preferred embodiments, peptides inserted into a loop of human serum albumin are peptide fragments or peptide variants of the Therapeutic proteins disclosed in Table 1. More particulary, the invention encompasses albumin fusion proteins which comprise peptide fragments or peptide variants at least 7 at least 8, at least 9, at least 10, at least 11, at least 12, at least 13, at least 14, at least 15, at least 20, at least 25, at least 30, at least 35, or at least 40 amino acids in length inserted into a loop of human serum albumin. The invention also encompasses albumin fusion proteins which comprise peptide fragments or peptide variants at least 7 at least 8, at least 9, at least 10, at least 11, at least 12, at least 13, at least 14, at least 15, at least 20, at least 25, at least 30, at least 35, or at least 40 amino acids fused to the N-terminus of human serum albumin. The invention also encompasses albumin fusion proteins which comprise peptide fragments or peptide variants at least 7 at least 8, at least 9, at least 10, at least 11, at least 12, at least 13, at least 14, at least 15, at least 20, at least 25, at least 30, at least 35, or at least 40 amino acids fused to the C-terminus of human serum albumin.

[0289] Generally, the albumin fusion proteins of the invention may have one HA-derived region and one Therapeutic protein-derived region. Multiple regions of each protein, however, may be used to make an albumin fusion protein of the invention. Similarly, more than one Therapeutic protein may be used to make an albumin fusion protein of the invention. For instance, a Therapeutic protein may be fused to both the N- and C-terminal ends of the HA. In such a configuration, the Therapeutic protein portions may be the same or different Therapeutic protein molecules. The structure of bifunctional albumin fusion proteins may be represented as X-HA-Y or Y-HA-X.

[0290] For example, an anti-BLyS™ scFv-HA-IFNα-2b fusion may be prepared to modulate the immune response to IFNα-2b by anti-BLyS™ scFv. An alternative is making a bi (or even multi) functional dose of HA-fusions e.g. HA-IFNα-2b fusion mixed with HA-anti-BLyS™ scFv fusion or other HA-fusions in various ratio's depending on function, half-life etc.

[0291] Bi- or multi-functional albumin fusion proteins may also be prepared to target the Therapeutic protein portion of a fusion to a target organ or cell type via protein or peptide at the opposite terminus of HA.

[0292] As an alternative to the fusion of known therapeutic molecules, the peptides could be obtained by screening libraries constructed as fusions to the N-, C- or N- and C-termini of HA, or domain fragment of HA, of typically 6, 8, 12, 20 or 25 or Xₙ (where X is an amino acid (aa) and n equals the number of residues) randomized amino acids, and in which all possible combinations of amino acids were represented. A particular advantage of this approach is that the peptides may be selected in situ on the HA molecule and the properties of the peptide would therefore be as selected for rather than, potentially, modified as might be the case for a peptide derived by any other method then being attached to HA.

[0293] Additionally, the albumin fusion proteins of the invention may include a linker peptide between the fused portions to provide greater physical separation between the moieties and thus maximize the accessibility of the Therapeutic protein portion, for instance, for binding to its cognate receptor. The linker peptide may consist of amino acids such that it is flexible or more rigid.

[0294] The linker sequence may be cleavable by a protease or chemically to yield the growth hormone related moiety. Preferably, the protease is one which is produced naturally by the host, for example the S. cerevisiae protease kex2 or equivalent proteases.

[0295] Therefore, as described above, the albumin fusion proteins of the invention may have the following formula R1-L-R2; R2-L-R1; or R1-L-R2-L-R1, wherein R1 is at least one Therapeutic protein, peptide or polypeptide sequence, and not necessarily the same Therapeutic protein, L is a linker and R2 is a serum albumin sequence.

[0296] In preferred embodiments, Albumin fusion proteins of the invention comprising a Therapeutic protein have extended shelf life compared to the shelf life the same Therapeutic protein when not fused to albumin. Shelf-life typically refers to the time period over which the therapeutic activity of a Therapeutic protein in solution or in some other storage formulation, is stable without undue loss of therapeutic activity. Many of the Therapeutic proteins are highly labile in their unfused state. As described below, the typical shelf-life of these Therapeutic proteins is markedly prolonged upon incorporation into the albumin fusion protein of the invention.

[0297] Albumin fusion proteins of the invention with “prolonged” or “extended” shelf-life exhibit greater therapeutic activity relative to a standard that has been subjected to the same storage and handling conditions. The standard may be the unfused full-length Therapeutic protein. When the Therapeutic protein portion of the albumin fusion protein is an analog, a variant, or is otherwise altered or does not include the complete sequence for that protein, the prolongation of therapeutic activity may alternatively be compared to the unfused equivalent of that analog, variant, altered peptide or incomplete sequence. As an example, an albumin fusion protein of the invention may retain greater than about 100% of the therapeutic activity, or greater than about 105%, 110%, 120%, 130%, 150% or 200% of the therapeutic activity of a standard when subjected to the same storage and handling conditions as the standard when compared at a given time point.

[0298] Shelf-life may also be assessed in terms of therapeutic activity remaining after storage, normalized to therapeutic activity when storage began. Albumin fusion proteins of the invention with prolonged or extended shelf-life as exhibited by prolonged or extended therapeutic activity may retain greater than about 50% of the therapeutic activity, about 60%, 70%, 80%, or 90% or more of the therapeutic activity of the equivalent unfused Therapeutic protein when subjected to the same conditions. For example, as discussed in Example 1, an albumin fusion protein of the invention comprising hGH fused to the full length HA sequence may retain about 80% or more of its original activity in solution for periods of up to 5 weeks or more under various temperature conditions.

[0299] Expression of Fusion Proteins

[0300] The albumin fusion proteins of the invention may be produced as recombinant molecules by secretion from yeast, a microorganism such as a bacterium, or a human or animal cell line. Preferably, the polypeptide is secreted from the host cells. We have found that, by fusing the hGH coding sequence to the HA coding sequence, either to the 5′ end or 3′ end, it is possible to secrete the albumin fusion protein from yeast without the requirement for a yeast-derived pro sequence. This was surprising, as other workers have found that a yeast derived pro sequence was needed for efficient secretion of hGH in yeast.

[0301] For example, Hiramatsu et al. (Appl Environ Microbiol 56:2125 (1990); Appl Environ Microbiol 57:2052 (1991)) found that the N-terminal portion of the pro sequence in the Mucor pusillus rennin pre-pro leader was important. Other authors, using the MF□-1 signal, have always included the MF□-1 pro sequence when secreting hGH. The pro sequences were believed to assist in the folding of the hGH by acting as an intramolecular chaperone. The present invention shows that HA or fragments of HA can perform a similar function.

[0302] Hence, a particular embodiment of the invention comprises a DNA construct encoding a signal sequence effective for directing secretion in yeast, particularly a yeast-derived signal sequence (especially one which is homologous to the yeast host), and the fused molecule of the first aspect of the invention, there being no yeast-derived pro sequence between the signal and the mature polypeptide.

[0303] The Saccharomyces cerevisiae invertase signal is a preferred example of a yeast-derived signal sequence.

[0304] Conjugates of the kind prepared by Poznansky et al., (FEBS Lett. 239:18 (1988)), in which separately-prepared polypeptides are joined by chemical cross-linking, are not contemplated.

[0305] The present invention also includes a cell, preferably a yeast cell transformed to express an albumin fusion protein of the invention. In addition to the transformed host cells themselves, the present invention also contemplates a culture of those cells, preferably a monoclonal (clonally homogeneous) culture, or a culture derived from a monoclonal culture, in a nutrient medium. If the polypeptide is secreted, the medium will contain the polypeptide, with the cells, or without the cells if they have been filtered or centrifuged away. Many expression systems are known and may be used, including bacteria (for example E. coli and Bacillus subtilis), yeasts (for example Saccharomyces cerevisiae, Kluyveromyces lactis and Pichia pastoris, filamentous fungi (for example Aspergillus), plant cells, animal cells and insect cells.

[0306] Preferred yeast strains to be used in the production of albumin fusion proteins are D88, DXY1 and BXP10. D88 [leu2-3, leu2-122, can1, pra1, ubc4] is a derivative of parent strain AH22his⁺ (also known as DB1; see, e.g., Sleep et al. Biotechnology 8:42-46 (1990)). The strain contains a leu2 mutation which allows for auxotropic selection of 2 micron-based plasmids that contain the LEU2 gene. D88 also exhibits a derepression of PRB1 in glucose excess. The PRB1 promoter is normally controlled by two checkpoints that monitor glucose levels and growth stage. The promoter is activated in wild type yeast upon glucose depletion and entry into stationary phase. Strain D88 exhibits the repression by glucose but maintains the induction upon entry into stationary phase. The PRA1 gene encodes a yeast vacuolar protease, YscA endoprotease A, that is localized in the ER. The UBC4 gene is in the ubiquitination pathway and is involved in targeting short lived and abnormal proteins for ubiquitin dependant degradation. Isolation of this ubc4 mutation was found to increase the copy number of an expression plasmid in the cell and cause an increased level of expression of a desired protein expressed from the plasmid (see, e.g., International Publication No. WO99/00504, hereby incorporated in its entirety by reference herein).

[0307] DXY1, a derivative of D88, has the following genotype: [leu2-3, leu2-122, can1, pra1, ubc4, ura3::yap3]. In addition to the mutations isolated in D88, this strain also has a knockout of the YAP3 protease. This protease causes cleavage of mostly di-basic residues (RR, RK, KR, KK) but can also promote cleavage at single basic residues in proteins. Isolation of this yap3 mutation resulted in higher levels of full length HSA production (see, e.g., U.S. Pat. No. 5,965,386 and Kerry-Williams et al., Yeast 14:161-169 (1998), hereby incorporated in their entireties by reference herein).

[0308] BXP10 has the following genotype: leu2-3, leu2-122, can1, pra1, ubc4, ura3, yap3::URA3, lys2, hsp150::LYS2, pmt1::URA3. In addition to the mutations isolated in DXY1, this strain also has a knockout of the PMT1 gene and the HSP150 gene. The PMT1 gene is a member of the evolutionarily conserved family of dolichyl-phosphate-D-mannose protein O-mannosyltransferases (Pmts). The transmembrane topology of Pmt1p suggests that it is an integral membrane protein of the endoplasmic reticulum with a role in O-linked glycosylation. This mutation serves to reduce/eliminate O-linked glycosylation of HSA fusions (see, e.g., International Publication No. WO00/44772, hereby incorporated in its entirety by reference herein). Studies revealed that the Hsp150 protein is inefficiently separated from rHA by ion exchange chromatography. The mutation in the HSP150 gene removes a potential contaminant that has proven difficult to remove by standard purification techniques. See, e.g., U.S. Pat. No. 5,783,423, hereby incorporated in its entirety by reference herein.

[0309] The desired protein is produced in conventional ways, for example from a coding sequence inserted in the host chromosome or on a free plasmid. The yeasts are transformed with a coding sequence for the desired protein in any of the usual ways, for example electroporation. Methods for transformation of yeast by electroporation are disclosed in Becker & Guarente (1990) Methods Enzymol. 194, 182.

[0310] Successfully transformed cells, i.e., cells that contain a DNA construct of the present invention, can be identified by well known techniques. For example, cells resulting from the introduction of an expression construct can be grown to produce the desired polypeptide. Cells can be harvested and lysed and their DNA content examined for the presence of the DNA using a method such as that described by Southern (1975) J. Mol. Biol. 98, 503 or Berent et al. (1985) Biotech. 3, 208. Alternatively, the presence of the protein in the supernatant can be detected using antibodies.

[0311] Useful yeast plasmid vectors include pRS403-406 and pRS413-416 and are generally available from Stratagene Cloning Systems, La Jolla, Calif. 92037, USA. Plasmids pRS403, pRS404, pRS405 and pRS406 are Yeast Integrating plasmids (Yips) and incorporate the yeast selectable markers HIS3, 7RP1, LEU2 and URA3. Plasmids pRS413-416 are Yeast Centromere plasmids (Ycps).

[0312] Preferred vectors for making albumin fusion proteins for expression in yeast include pPPC0005, pScCHSA, pScNHSA, and pC4:HSA which are described in detail in Example 2. FIG. 4 shows a map of the pPPC0005 plasmid that can be used as the base vector into which polynucleotides encoding Therapeutic proteins may be cloned to form HA-fusions. It contains a PRB1 S. cerevisiae promoter (PRB1p), a Fusion leader sequence (FL), DNA encoding HA (rHA) and an ADH1 S. cerevisiae terminator sequence. The sequence of the fusion leader sequence consists of the first 19 amino acids of the signal peptide of human serum albumin (SEQ ID NO:29) and the last five amino acids of the mating factor alpha 1 promoter (SLDKR, see EP-A-387 319 which is hereby incorporated by reference in its entirety.

[0313] The plasmids, pPPC0005, pScCHSA, pScNHSA, and pC4:HSA were deposited on Apr. 11, 2001 at the American Type Culture Collection, 10801 University Boulevard, Manassas, Va. 20110-2209 and given accession numbers ATCC ______, ______, ______, and ______, respectively. Another vector useful for expressing an albumin fusion protein in yeast the pSAC35 vector which is described in Sleep et al., BioTechnology 8:42 (1990) which is hereby incorporated by reference in its entirety.

[0314] A variety of methods have been developed to operably link DNA to vectors via complementary cohesive termini. For instance, complementary homopolymer tracts can be added to the DNA segment to be inserted to the vector DNA. The vector and DNA segment are then joined by hydrogen bonding between the complementary homopolymeric tails to form recombinant DNA molecules.

[0315] Synthetic linkers containing one or more restriction sites provide an alternative method of joining the DNA segment to vectors. The DNA segment, generated by endonuclease restriction digestion, is treated with bacteriophage T4 DNA polymerase or E. coli DNA polymerase I, enzymes that remove protruding, □-single-stranded termini with their 3′ 5′-exonucleolytic activities, and fill in recessed 3′-ends with their polymerizing activities.

[0316] The combination of these activities therefore generates blunt-ended DNA segments. The blunt-ended segments are then incubated with a large molar excess of linker molecules in the presence of an enzyme that is able to catalyze the ligation of blunt-ended DNA molecules, such as bacteriophage T4 DNA ligase. Thus, the products of the reaction are DNA segments carrying polymeric linker sequences at their ends. These DNA segments are then cleaved with the appropriate restriction enzyme and ligated to an expression vector that has been cleaved with an enzyme that produces termini compatible with those of the DNA segment.

[0317] Synthetic linkers containing a variety of restriction endonuclease sites are commercially available from a number of sources including International Biotechnologies Inc, New Haven, Conn., USA.

[0318] A desirable way to modify the DNA in accordance with the invention, if, for example, HA variants are to be prepared, is to use the polymerase chain reaction as disclosed by Saiki et al. (1988) Science 239, 487-491. In this method the DNA to be enzymatically amplified is flanked by two specific oligonucleotide primers which themselves become incorporated into the amplified DNA. The specific primers may contain restriction endonuclease recognition sites which can be used for cloning into expression vectors using methods known in the art.

[0319] Exemplary genera of yeast contemplated to be useful in the practice of the present invention as hosts for expressing the albumin fusion proteins are Pichia (Hansenula), Saccharomyces, Kluyveromyces, Candida, Torulopsis, Torulaspora, Schizosaccharomyces, Citeromyces, Pachysolen, Debaromyces, Metschunikowia, Rhodosporidium, Leucosporidium, Botryoascus, Sporidiobolus, Endomycopsis, and the like. Preferred genera are those selected from the group consisting of Saccharomyces, Schizosaccharomyces, Kluyveromyces, Pichia and Torulaspora. Examples of Saccharomyces spp. are S. cerevisiae, S. italicus and S. rouxii.

[0320] Examples of Kluyveromyces spp. are K. fragilis, K. lactis and K. marxianus. A suitable Torulaspora species is T. delbrueckii. Examples of Pichia (Hansenula) spp. are P. angusta (formerly H. polymorpha), P. anomala (formerly H. anomala) and P. pastoris. Methods for the transformation of S. cerevisiae are taught generally in EP 251 744, EP 258 067 and WO 90/01063, all of which are incorporated herein by reference.

[0321] Preferred exemplary species of Saccharomyces include S. cerevisiae, S. italicus, S. diastaticus, and Zygosaccharomyces rouxii. Preferred exemplary species of Kluyveromyces include K. fragilis and K. lactis. Preferred exemplary species of Hansenula include H. polymorpha (now Pichia angusta), H. anomala (now Pichia anomala), and Pichia capsulata. Additional preferred exemplary species of Pichia include P. pastoris. Preferred exemplary species of Aspergillus include A. niger and A. nidulans. Preferred exemplary species of Yarrowia include Y. lipolytica. Many preferred yeast species are available from the ATCC. For example, the following preferred yeast species are available from the ATCC and are useful in the expression of albumin fusion proteins: Saccharomyces cerevisiae Hansen, teleomorph strain BY4743 yap3 mutant (ATCC Accession No. 4022731); Saccharomyces cerevisiae Hansen, teleomorph strain BY4743 hsp150 mutant (ATCC Accession No. 4021266); Saccharomyces cerevisiae Hansen, teleomorph strain BY4743 pmt1 mutant (ATCC Accession No. 4023792); Saccharomyces cerevisiae Hansen, teleomorph (ATCC Accession Nos. 20626; 44773; 44774; and 62995); Saccharomyces diastaticus Andrews et Gilliland ex van der Walt, teleomorph (ATCC Accession No. 62987); Kluyveromyces lactis (Dombrowski) van der Walt, teleomorph (ATCC Accession No. 76492); Pichia angusta (Teunisson et al.) Kurtzman, teleomorph deposited as Hansenula polymorpha de Morais et Maia, teleomorph (ATCC Accession No. 26012); Aspergillus niger van Tieghem, anamorph (ATCC Accession No. 9029); Aspergillus niger van Tieghem, anamorph (ATCC Accession No. 16404); Aspergillus nidulans (Eidam) Winter, anamorph (ATCC Accession No. 48756); and Yarrowia lipolytica (Wickerham et al.) van der Walt et von Arx, teleomorph (ATCC Accession No. 201847).

[0322] Suitable promoters for S. cerevisiae include those associated with the PGKI gene, GAL1 or GAL10 genes, CYCI, PHO5, TRPI, ADHI, ADH2, the genes for glyceraldehyde-3-phosphate dehydrogenase, hexokinase, pyruvate decarboxylase, phosphofructokinase, triose phosphate isomerase, phosphoglucose isomerase, glucokinase, alpha-mating factor pheromone, [a mating factor pheromone], the PRBI promoter, the GUT2 promoter, the GPDI promoter, and hybrid promoters involving hybrids of parts of 5′ regulatory regions with parts of 5′ regulatory regions of other promoters or with upstream activation sites (e.g. the promoter of EP-A-258 067).

[0323] Convenient regulatable promoters for use in Schizosaccharomyces pombe are the thiamine-repressible promoter from the nmt gene as described by Maundrell (1990) J. Biol. Chem. 265, 10857-10864 and the glucose repressible jbp1 gene promoter as described by Hoffman & Winston (1990) Genetics 124, 807-816.

[0324] Methods of transforming Pichia for expression of foreign genes are taught in, for example, Cregg et al. (1993), and various Phillips patents (e.g. U.S. Pat. No. 4,857,467, incorporated herein by reference), and Pichia expression kits are commercially available from Invitrogen BV, Leek, Netherlands, and Invitrogen Corp., San Diego, Calif. Suitable promoters include AOXI and AOX2. Gleeson et al. (1986) J. Gen. Microbiol. 132, 3459-3465 include information on Hansenula vectors and transformation, suitable promoters being MOX1 and FMD1; whilst EP 361 991, Fleer et al. (1991) and other-publications from Rhone-Poulenc Rorer teach how to express foreign proteins in Kluyveromyces spp., a suitable promoter being PGKI.

[0325] The transcription termination signal is preferably the 3′ flanking sequence of a eukaryotic gene which contains proper signals for transcription termination and polyadenylation. Suitable 3′ flanking sequences may, for example, be those of the gene naturally linked to the expression control sequence used, i.e. may correspond to the promoter. Alternatively, they may be different in which case the termination signal of the S. cerevisiae ADHI gene is preferred.

[0326] The desired albumin fusion protein may be initially expressed with a secretion leader sequence, which may be any leader effective in the yeast chosen. Leaders useful in S. cerevisiae include that from the mating factor α polypeptide (MFα-1) and the hybrid leaders of EP-A-387 319. Such leaders (or signals) are cleaved by the yeast before the mature albumin is released into the surrounding medium. Further such leaders include those of S. cerevisiae invertase (SUC2) disclosed in JP 62-096086 (granted as 911036516), acid phosphatase (PH05), the pre-sequence of MFoz-1, 0 glucanase (BGL2) and killer toxin; S. diastaticus glucoamylase II; S. carlsbergensis β-galactosidase (MEL1); K. lactis killer toxin; and Candida glucoamylase.

[0327] Additional Methods of Recombinant and Synthetic Production of Albumin Fusion Proteins

[0328] The present invention also relates to vectors containing a polynucleotide encoding an albumin fusion protein of the present invention, host cells, and the production of albumin fusion proteins by synthetic and recombinant techniques. The vector may be, for example, a phage, plasmid, viral, or retroviral vector. Retroviral vectors may be replication competent or replication defective. In the latter case, viral propagation generally will occur only in complementing host cells.

[0329] The polynucleotides encoding albumin fusion proteins of the invention may be joined to a vector containing a selectable marker for propagation in a host. Generally, a plasmid vector is introduced in a precipitate, such as a calcium phosphate precipitate, or in a complex with a charged lipid. If the vector is a virus, it may be packaged in vitro using an appropriate packaging cell line and then transduced into host cells.

[0330] The polynucleotide insert should be operatively linked to an appropriate promoter, such as the phage lambda PL promoter, the E. coli lac, trp, phoA and tac promoters, the SV40 early and late promoters and promoters of retroviral LTRs, to name a few. Other suitable promoters will be known to the skilled artisan. The expression constructs will further contain sites for transcription initiation, termination, and, in the transcribed region, a ribosome binding site for translation. The coding portion of the transcripts expressed by the constructs will preferably include a translation initiating codon at the beginning and a termination codon (UAA, UGA or UAG) appropriately positioned at the end of the polypeptide to be translated.

[0331] As indicated, the expression vectors will preferably include at least one selectable marker. Such markers include dihydrofolate reductase, G418, glutamine synthase, or neomycin resistance for eukaryotic cell culture, and tetracycline, kanamycin or ampicillin resistance genes for culturing in E. coli and other bacteria. Representative examples of appropriate hosts include, but are not limited to, bacterial cells, such as E. coli, Streptomyces and Salmonella typhimurium cells; fungal cells, such as yeast cells (e.g., Saccharomyces cerevisiae or Pichia pastoris (ATCC Accession No. 201178)); insect cells such as Drosophila S2 and Spodoptera Sf9 cells; animal cells such as CHO, COS, NSO, 293, and Bowes melanoma cells; and plant cells. Appropriate culture mediums and conditions for the above-described host cells are known in the art.

[0332] Among vectors preferred for use in bacteria include pQE70, pQE60 and pQE-9, available from QIAGEN, Inc.; pBluescript vectors, Phagescript vectors, pNH8A, pNH16a, pNH18A, pNH46A, available from Stratagene Cloning Systems, Inc.; and ptrc99a, pKK223-3, pKK233-3, pDR540, pRIT5 available from Pharmacia Biotech, Inc. Among preferred eukaryotic vectors are pWLNEO, pSV2CAT, pOG44, pXT1 and pSG available from Stratagene; and pSVK3, pBPV, pMSG and pSVL available from Pharmacia. Preferred expression vectors for use in yeast systems include, but are not limited to pYES2, pYD1, pTEF1/Zeo, pYES2/GS, pPICZ, pGAPZ, pGAPZalph, pPIC9, pPIC3.5, pHIL-D2, pHIL-S1, pPIC3.5K, pPIC9K, and PAO815 (all available from Invitrogen, Carlbad, Calif.). Other suitable vectors will be readily apparent to the skilled artisan.

[0333] In one embodiment, polynucleotides encoding an albumin fusion protein of the invention may be fused to signal sequences which will direct the localization of a protein of the invention to particular compartments of a prokaryotic or eukaryotic cell and/or direct the secretion of a protein of the invention from a prokaryotic or eukaryotic cell. For example, in E. coli, one may wish to direct the expression of the protein to the periplasmic space. Examples of signal sequences or proteins (or fragments thereof) to which the albumin fusion proteins of the invention may be fused in order to direct the expression of the polypeptide to the periplasmic space of bacteria include, but are not limited to, the pelB signal sequence, the maltose binding protein (MBP) signal sequence, MBP, the ompA signal sequence, the signal sequence of the periplasmic E. coli heat-labile enterotoxin B-subunit, and the signal sequence of alkaline phosphatase. Several vectors are commercially available for the construction of fusion proteins which will direct the localization of a protein, such as the pMAL series of vectors (particularly the pMAL-p series) available from New England Biolabs. In a specific embodiment, polynucleotides albumin fusion proteins of the invention may be fused to the pelB pectate lyase signal sequence to increase the efficiency of expression and purification of such polypeptides in Gram-negative bacteria. See, U.S. Pat. Nos. 5,576,195 and 5,846,818, the contents of which are herein incorporated by reference in their entireties.

[0334] Examples of signal peptides that may be fused to an albumin fusion protein of the invention in order to direct its secretion in mammalian cells include, but are not limited to, the MPIF-1 signal sequence (e.g., amino acids 1-21 of GenBank Accession number AAB51134), the stanniocalcin signal sequence (MLQNSAVLLLLVISASA, SEQ ID NO:34), and a consensus signal sequence (MPTWAWWLFLVLLLALWAPARG, SEQ ID NO:35). A suitable signal sequence that may be used in conjunction with baculoviral expression systems is the gp67 signal sequence (e.g., amino acids 1-19 of GenBank Accession Number AAA72759).

[0335] Vectors which use glutamine synthase (GS) or DHFR as the selectable markers can be amplified in the presence of the drugs methionine sulphoximine or methotrexate, respectively. An advantage of glutamine synthase based vectors are the availabilty of cell lines (e.g., the murine myeloma cell line, NSO) which are glutamine synthase negative. Glutamine synthase expression systems can also function in glutamine synthase expressing cells (e.g., Chinese Hamster Ovary (CHO) cells) by providing additional inhibitor to prevent the functioning of the endogenous gene. A glutamine synthase expression system and components thereof are detailed in PCT publications: WO87/04462; WO86/05807; WO89/01036; WO89/10404; and WO91/06657, which are hereby incorporated in their entireties by reference herein. Additionally, glutamine synthase expression vectors can be obtained from Lonza Biologics, Inc. (Portsmouth, N.H.). Expression and production of monoclonal antibodies using a GS expression system in murine myeloma cells is described in Bebbington et al., Bio/technology 10:169 (1992) and in Biblia and Robinson Biotechnol. Prog. 11:1 (1995) which are herein incorporated by reference.

[0336] The present invention also relates to host cells containing the above-described vector constructs described herein, and additionally encompasses host cells containing nucleotide sequences of the invention that are operably associated with one or more heterologous control regions (e.g., promoter and/or enhancer) using techniques known of in the art. The host cell can be a higher eukaryotic cell, such as a mammalian cell (e.g., a human derived cell), or a lower eukaryotic cell, such as a yeast cell, or the host cell can be a prokaryotic cell, such as a bacterial cell. A host strain may be chosen which modulates the expression of the inserted gene sequences, or modifies and processes the gene product in the specific fashion desired. Expression from certain promoters can be elevated in the presence of certain inducers; thus expression of the genetically engineered polypeptide may be controlled. Furthermore, different host cells have characteristics and specific mechanisms for the translational and post-translational processing and modification (e.g., phosphorylation, cleavage) of proteins. Appropriate cell lines can be chosen to ensure the desired modifications and processing of the foreign protein expressed.

[0337] Introduction of the nucleic acids and nucleic acid constructs of the invention into the host cell can be effected by calcium phosphate transfection, DEAE-dextran mediated transfection, cationic lipid-mediated transfection, electroporation, transduction, infection, or other methods. Such methods are described in many standard laboratory manuals, such as Davis et al., Basic Methods In Molecular Biology (1986). It is specifically contemplated that the polypeptides of the present invention may in fact be expressed by a host cell lacking a recombinant vector.

[0338] In addition to encompassing host cells containing the vector constructs discussed herein, the invention also encompasses primary, secondary, and immortalized host cells of vertebrate origin, particularly mammalian origin, that have been engineered to delete or replace endogenous genetic material (e.g., the coding sequence corresponding to a Therapeutic protein may be replaced with an albumin fusion protein corresponding to the Therapeutic protein), and/or to include genetic material (e.g., heterologous polynucleotide sequences such as for example, an albumin fusion protein of the invention corresponding to the Therapeutic protein may be included). The genetic material operably associated with the endogenous polynucleotide may activate, alter, and/or amplify endogenous polynucleotides.

[0339] In addition, techniques known in the art may be used to operably associate heterologous polynucleotides (e.g., polynucleotides encoding an albumin protein, or a fragment or variant thereof) and/or heterologous control regions (e.g., promoter and/or enhancer) with endogenous polynucleotide sequences encoding a Therapeutic protein via homologous recombination (see, e.g., U.S. Pat. No. 5,641,670, issued Jun. 24, 1997; International Publication Number WO 96/29411; International Publication Number WO 94/12650; Koller et al., Proc. Natl. Acad. Sci. USA 86:8932-8935 (1989); and Zijlstra et al., Nature 342:435-438 (1989), the disclosures of each of which are incorporated by reference in their entireties).

[0340] Albumin fusion proteins of the invention can be recovered and purified from recombinant cell cultures by well-known methods including ammonium sulfate or ethanol precipitation, acid extraction, anion or cation exchange chromatography, phosphocellulose chromatography, hydrophobic interaction chromatography, affinity chromatography, hydroxylapatite chromatography, hydrophobic charge interaction chromatography and lectin chromatography. Most preferably, high performance liquid chromatography (“HPLC”) is employed for purification.

[0341] In preferred embodiments the albumin fusion proteins of the invention are purified using Anion Exchange Chromatography including, but not limited to, chromatography on Q-sepharose, DEAE sepharose, poros HQ, poros DEAE, Toyopearl Q, Toyopearl QAE, Toyopearl DEAE, Resource/Source Q and DEAE, Fractogel Q and DEAE columns.

[0342] In specific embodiments the albumin fusion proteins of the invention are purified using Cation Exchange Chromatography including, but not limited to, SP-sepharose, CM sepharose, poros HS, poros CM, Toyopearl SP, Toyopearl CM, Resource/Source S and CM, Fractogel S and CM columns and their equivalents and comparables.

[0343] In specific embodiments the albumin fusion proteins of the invention are purified using Hydrophobic Interaction Chromatography including, but not limited to, Phenyl, Butyl, Methyl, Octyl, Hexyl-sepharose, poros Phenyl, Butyl, Methyl, Octyl, Hexyl, Toyopearl Phenyl, Butyl, Methyl, Octyl, Hexyl Resource/Source Phenyl, Butyl, Methyl, Octyl, Hexyl, Fractogel Phenyl, Butyl, Methyl, Octyl, Hexyl columns and their equivalents and comparables.

[0344] In specific embodiments the albumin fusion proteins of the invention are purified using Size Exclusion Chromatography including, but not limited to, sepharose S100, S200, S300, superdex resin columns and their equivalents and comparables.

[0345] In specific embodiments the albumin fusion proteins of the invention are purified using Affinity Chromatography including, but not limited to, Mimetic Dye affinity, peptide affinity and antibody affinity columns that are selective for either the HSA or the “fusion target” molecules.

[0346] In preferred embodiments albumin fusion proteins of the invention are purified using one or more Chromatography methods listed above. In other preferred embodiments, albumin fusion proteins of the invention are purified using one or more of the following Chromatography columns, Q sepharose FF column, SP Sepharose FF column, Q Sepharose High Performance Column, Blue Sepharose FF column, Blue Column, Phenyl Sepharose FF column, DEAE Sepharose FF, or Methyl Column.

[0347] Additionally, albumin fusion proteins of the invention may be purified using the process described in PCT International Publication WO 00/44772 which is herein incorporated by reference in its entirety. One of skill in the art could easily modify the process described therein for use in the purification of albumin fusion proteins of the invention.

[0348] Albumin fusion proteins of the present invention may be recovered from: products of chemical synthetic procedures; and products produced by recombinant techniques from a prokaryotic or eukaryotic host, including, for example, bacterial, yeast, higher plant, insect, and mammalian cells. Depending upon the host employed in a recombinant production procedure, the polypeptides of the present invention may be glycosylated or may be non-glycosylated. In addition, albumin fusion proteins of the invention may also include an initial modified methionine residue, in some cases as a result of host-mediated processes. Thus, it is well known in the art that the N-terminal methionine encoded by the translation initiation codon generally is removed with high efficiency from any protein after translation in all eukaryotic cells. While the N-terminal methionine on most proteins also is efficiently removed in most prokaryotes, for some proteins, this prokaryotic removal process is inefficient, depending on the nature of the amino acid to which the N-terminal methionine is covalently linked.

[0349] In one embodiment, the yeast Pichia pastoris is used to express albumin fusion proteins of the invention in a eukaryotic system. Pichia pastoris is a methylotrophic yeast which can metabolize methanol as its sole carbon source. A main step in the methanol metabolization pathway is the oxidation of methanol to formaldehyde using O₂. This reaction is catalyzed by the enzyme alcohol oxidase. In order to metabolize methanol as its sole carbon source, Pichia pastoris must generate high levels of alcohol oxidase due, in part, to the relatively low affinity of alcohol oxidase for O₂. Consequently, in a growth medium depending on methanol as a main carbon source, the promoter region of one of the two alcohol oxidase genes (AOX1) is highly active. In the presence of methanol, alcohol oxidase produced from the AOX1 gene comprises up to approximately 30% of the total soluble protein in Pichia pastoris. See Ellis, S. B., et al., Mol. Cell. Biol. 5:1111-21 (1985); Koutz, P. J, et al., Yeast 5:167-77 (1989); Tschopp, J. F., et al., Nucl. Acids Res. 15:3859-76 (1987). Thus, a heterologous coding sequence, such as, for example, a polynucleotide of the present invention, under the transcriptional regulation of all or part of the AOX1 regulatory sequence is expressed at exceptionally high levels in Pichia yeast grown in the presence of methanol.

[0350] In one example, the plasmid vector pPIC9K is used to express DNA encoding an albumin fusion protein of the invention, as set forth herein, in a Pichea yeast system essentially as described in “Pichia Protocols: Methods in Molecular Biology,” D. R. Higgins and J. Cregg, eds. The Humana Press, Totowa, N.J., 1998. This expression vector allows expression and secretion of a polypeptide of the invention by virtue of the strong AOX1 promoter linked to the Pichia pastoris alkaline phosphatase (PHO) secretory signal peptide (i.e., leader) located upstream of a multiple cloning site.

[0351] Many other yeast vectors could be used in place of pPIC9K, such as, pYES2, pYD1, pTEF1/Zeo, pYES2/GS, pPICZ, pGAPZ, pGAPZalpha, pPIC9, pPIC3.5, pHIL-D2, pHIL-S1, pPIC3.5K, and PAO815, as one skilled in the art would readily appreciate, as long as the proposed expression construct provides appropriately located signals for transcription, translation, secretion (if desired), and the like, including an in-frame AUG as required.

[0352] In another embodiment, high-level expression of a heterologous coding sequence, such as, for example, a polynucleotide encoding an albumin fusion protein of the present invention, may be achieved by cloning the heterologous polynucleotide of the invention into an expression vector such as, for example, pGAPZ or pGAPZalpha, and growing the yeast culture in the absence of methanol.

[0353] In addition, albumin fusion proteins of the invention can be chemically synthesized using techniques known in the art (e.g., see Creighton, 1983, Proteins: Structures and Molecular Principles, W.H. Freeman & Co., N.Y., and Hunkapiller et al., Nature, 310:105-111 (1984)). For example, a polypeptide corresponding to a fragment of a polypeptide can be synthesized by use of a peptide synthesizer. Furthermore, if desired, nonclassical amino acids or chemical amino acid analogs can be introduced as a substitution or addition into the polypeptide sequence. Non-classical amino acids include, but are not limited to, to the D-isomers of the common amino acids, 2,4-diaminobutyric acid, α-amino isobutyric acid, 4-aminobutyric acid, Abu, 2-amino butyric acid, g-Abu, e-Ahx, 6-amino hexanoic acid, Aib, 2-amino isobutyric acid, 3-amino propionic acid, ornithine, norleucine, norvaline, hydroxyproline, sarcosine, citrulline, homocitrulline, cysteic acid, t-butylglycine, t-butylalanine, phenylglycine, cyclohexylalanine, b-alanine, fluoro-amino acids, designer amino acids such as b-methyl amino acids, Ca-methyl amino acids, Na-methyl amino acids, and amino acid analogs in general. Furthermore, the amino acid can be D (dextrorotary) or L (levorotary).

[0354] The invention encompasses albumin fusion proteins of the present invention which are differentially modified during or after translation, e.g., by glycosylation, acetylation, phosphorylation, amidation, derivatization by known protecting/blocking groups, proteolytic cleavage, linkage to an antibody molecule or other cellular ligand, etc. Any of numerous chemical modifications may be carried out by known techniques, including but not limited, to specific chemical cleavage by cyanogen bromide, trypsin, chymotrypsin, papain, V8 protease, NaBH₄; acetylation, formylation, oxidation, reduction; metabolic synthesis in the presence of tunicamycin; etc.

[0355] Additional post-translational modifications encompassed by the invention include, for example, e.g., N-linked or O-linked carbohydrate chains, processing of N-terminal or C-terminal ends), attachment of chemical moieties to the amino acid backbone, chemical modifications of N-linked or O-linked carbohydrate chains, and addition or deletion of an N-terminal methionine residue as a result of procaryotic host cell expression. The albumin fusion proteins may also be modified with a detectable label, such as an enzymatic, fluorescent, isotopic or affinity label to allow for detection and isolation of the protein.

[0356] Examples of suitable enzymes include horseradish peroxidase, alkaline phosphatase, beta-galactosidase, or acetylcholinesterase; examples of suitable prosthetic group complexes include streptavidin/biotin and avidin/biotin; examples of suitable fluorescent materials include umbelliferone, fluorescein, fluorescein isothiocyanate, rhodamine, dichlorotriazinylamine fluorescein, dansyl chloride or phycoerythrin; an example of a luminescent material includes luminol; examples of bioluminescent materials include luciferase, luciferin, and aequorin; and examples of suitable radioactive material include iodine (¹²¹I, ¹²³I, ¹²⁵I, ¹³¹I), carbon (¹⁴C), sulfur (³⁵S), tritium (³H), indium (¹¹¹In, ¹¹²In, ^{113m}In, ^{115m}In), technetium (⁹⁹Tc,^{99m}Tc), thallium (²⁰¹Ti), gallium (⁶⁸Ga, ⁶⁷Ga), palladium (¹⁰³Pd), molybdenum (⁹⁹Mo), xenon (¹³³Xe), fluorine (¹⁸F), ¹⁵³Sm, ¹⁷⁷Lu, ¹⁵⁹Gd, ¹⁴⁹Pm, ¹⁴⁰La, ¹⁷⁵Yb, ¹⁶⁶Ho, ⁹⁰Y, ⁴⁷Sc, ¹⁸⁶Re, ¹⁸⁸Re, ¹⁴²Pr, ¹⁰⁵Rh, and ⁹⁷Ru.

[0357] In specific embodiments, albumin fusion proteins of the present invention or fragments or variants thereof are attached to macrocyclic chelators that associate with radiometal ions, including but not limited to, ¹⁷⁷Lu, ⁹⁰Y, ¹⁶⁶Ho, and, ¹⁵³ Sm, to polypeptides. In a preferred embodiment, the radiometal ion associated with the macrocyclic chelators is ¹¹¹In. In another preferred embodiment, the radiometal ion associated with the macrocyclic chelator is ⁹⁰Y. In specific embodiments, the macrocyclic chelator is 1,4,7,10-tetraazacyclododecane-N,N′,N″,N′″-tetraacetic acid (DOTA). In other specific embodiments, DOTA is attached to an antibody of the invention or fragment thereof via linker molecule. Examples of linker molecules useful for conjugating DOTA to a polypeptide are commonly known in the art—see, for example, DeNardo et al., Clin Cancer Res. 4(10):2483-90 (1998); Peterson et al., Bioconjug. Chem. 10(4):553-7 (1999); and Zimmerman et al, Nucl. Med. Biol. 26(8):943-50 (1999); which are hereby incorporated by reference in their entirety.

[0358] As mentioned, the albumin fusion proteins of the invention may be modified by either natural processes, such as post-translational processing, or by chemical modification techniques which are well known in the art. It will be appreciated that the same type of modification may be present in the same or varying degrees at several sites in a given polypeptide. Polypeptides of the invention may be branched, for example, as a result of ubiquitination, and they may be cyclic, with or without branching. Cyclic, branched, and branched cyclic polypeptides may result from posttranslation natural processes or may be made by synthetic methods. Modifications include acetylation, acylation, ADP-ribosylation, amidation, covalent attachment of flavin, covalent attachment of a heme moiety, covalent attachment of a nucleotide or nucleotide derivative, covalent attachment of a lipid or lipid derivative, covalent attachment of phosphotidylinositol, cross-linking, cyclization, disulfide bond formation, demethylation, formation of covalent cross-links, formation of cysteine, formation of pyroglutamate, formylation, gamma-carboxylation, glycosylation, GPI anchor formation, hydroxylation, iodination, methylation, myristylation, oxidation, pegylation, proteolytic processing, phosphorylation, prenylation, racemization, selenoylation, sulfation, transfer-RNA mediated addition of amino acids to proteins such as arginylation, and ubiquitination. (See, for instance, PROTEINS—STRUCTURE AND MOLECULAR PROPERTIES, 2nd Ed., T. E. Creighton, W. H. Freeman and Company, New York (1993); POST-TRANSLATIONAL COVALENT MODIFICATION OF PROTEINS, B. C. Johnson, Ed., Academic Press, New York, pgs. 1-12 (1983); Seifter et al., Meth. Enzymol. 182:626-646 (1990); Rattan et al., Ann. N.Y. Acad. Sci. 663:48-62 (1992)).

[0359] Albumin fusion proteins of the invention and antibodies that bind a Therapeutic protein or fragments or variants thereof can be fused to marker sequences, such as a peptide to facilitate purification. In preferred embodiments, the marker amino acid sequence is a hexa-histidine peptide, such as the tag provided in a pQE vector (QIAGEN, Inc., 9259 Eton Avenue, Chatsworth, Calif., 91311), among others, many of which are commercially available. As described in Gentz et al., Proc. Natl. Acad. Sci. USA 86:821-824 (1989), for instance, hexa-histidine provides for convenient purification of the fusion protein. Other peptide tags useful for purification include, but are not limited to, the “HA” tag, which corresponds to an epitope derived from the influenza hemagglutinin protein (Wilson et al., Cell 37:767 (1984)) and the “flag” tag.

[0360] Further, an albumin fusion protein of the invention may be conjugated to a therapeutic moiety such as a cytotoxin, e.g., a cytostatic or cytocidal agent, a therapeutic agent or a radioactive metal ion, e.g., alpha-emitters such as, for example, 213Bi. A cytotoxin or cytotoxic agent includes any agent that is detrimental to cells. Examples include paclitaxol, cytochalasin B, gramicidin D, ethidium bromide, emetine, mitomycin, etoposide, tenoposide, vincristine, vinblastine, colchicin, doxorubicin, daunorubicin, dihydroxy anthracin dione, mitoxantrone, mithramycin, actinomycin D, 1-dehydrotestosterone, glucocorticoids, procaine, tetracaine, lidocaine, propranolol, and puromycin and analogs or homologs thereof. Therapeutic agents include, but are not limited to, antimetabolites (e.g., methotrexate, 6-mercaptopurine, 6-thioguanine, cytarabine, 5-fluorouracil decarbazine), alkylating agents (e.g., mechlorethamine, thioepa chlorambucil, melphalan, carmustine (BSNU) and lomustine (CCNU), cyclothosphamide, busulfan, dibromomannitol, streptozotocin, mitomycin C, and cis-dichlorodiamine platinum (II) (DDP) cisplatin), anthracyclines (e.g., daunorubicin (formerly daunomycin) and doxorubicin), antibiotics (e.g., dactinomycin (formerly actinomycin), bleomycin, mithramycin, and anthramycin (AMC)), and anti-mitotic agents (e.g., vincristine and vinblastine).

[0361] The conjugates of the invention can be used for modifying a given biological response, the therapeutic agent or drug moiety is not to be construed as limited to classical chemical therapeutic agents. For example, the drug moiety may be a protein or polypeptide possessing a desired biological activity. Such proteins may include, for example, a toxin such as abrin, ricin A, pseudomonas exotoxin, or diphtheria toxin; a protein such as tumor necrosis factor, alpha-interferon, B-interferon, nerve growth factor, platelet derived growth factor, tissue plasminogen activator, an apoptotic agent, e.g., TNF-alpha, TNF-beta, AIM I (See, International Publication No. WO 97/33899), AIM II (See, International Publication No. WO 97/34911), Fas Ligand (Takahashi et al., Int. Immunol., 6:1567-1574 (1994)), VEGI (See, International Publication No. WO 99/23105), a thrombotic agent or an anti-angiogenic agent, e.g., angiostatin or endostatin; or, biological response modifiers such as, for example, lymphokines, interleukin-1 (“IL-1”), interleukin-2 (“IL-2”), interleukin-6 (“IL-6”), granulocyte macrophage colony stimulating factor (“GM-CSF”), granulocyte colony stimulating factor (“G-CSF”), or other growth factors. Techniques for conjugating such therapeutic moiety to proteins (e.g., albumin fusion proteins) are well known in the art.

[0362] Albumin fusion proteins may also be attached to solid supports, which are particularly useful for immunoassays or purification of polypeptides that are bound by, that bind to, or associate with albumin fusion proteins of the invention. Such solid supports include, but are not limited to, glass, cellulose, polyacrylamide, nylon, polystyrene, polyvinyl chloride or polypropylene.

[0363] Albumin fusion proteins, with or without a therapeutic moiety conjugated to it, administered alone or in combination with cytotoxic factor(s) and/or cytokine(s) can be used as a therapeutic.

[0364] In embodiments where the albumin fusion protein of the invention comprises only the VH domain of an antibody that binds a Therapeutic protein, it may be necessary and/or desirable to coexpress the fusion protein with the VL domain of the same antibody that binds a Therapeutic protein, such that the VH-albumin fusion protein and VL protein will associate (either covalently or non-covalently) post-translationally.

[0365] In embodiments where the albumin fusion protein of the invention comprises only the VL domain of an antibody that binds a Therapeutic protein, it may be necessary and/or desirable to coexpress the fusion protein with the VH domain of the same antibody that binds a Therapeutic protein, such that the VL-albumin fusion protein and VH protein will associate (either covalently or non-covalently) post-translationally.

[0366] Some Therapeutic antibodies are bispecific antibodies, meaning the antibody that binds a Therapeutic protein is an artificial hybrid antibody having two different heavy/light chain pairs and two different binding sites. In order to create an albumin fusion protein corresponding to that Therapeutic protein, it is possible to create an albumin fusion protein which has an scFv fragment fused to both the N- and C-terminus of the albumin protein moiety. More particularly, the scFv fused to the N-terminus of albumin would correspond to one of the heavy/light (VH/VL) pairs of the original antibody that binds a Therapeutic protein and the scFv fused to the C-terminus of albumin would correspond to the other heavy/light (VH/VL) pair of the original antibody that binds a Therapeutic protein.

[0367] Also provided by the invention are chemically modified derivatives of the albumin fusion proteins of the invention which may provide additional advantages such as increased solubility, stability and circulating time of the polypeptide, or decreased immunogenicity (see U.S. Pat. No. 4,179,337). The chemical moieties for derivitization may be selected from water soluble polymers such as polyethylene glycol, ethylene glycol/propylene glycol copolymers, carboxymethylcellulose, dextran, polyvinyl alcohol and the like. The albumin fusion proteins may be modified at random positions within the molecule, or at predetermined positions within the molecule and may include one, two, three or more attached chemical moieties.

[0368] The polymer may be of any molecular weight, and may be branched or unbranched. For polyethylene glycol, the preferred molecular weight is between about 1 kDa and about 100 kDa (the term “about” indicating that in preparations of polyethylene glycol, some molecules will weigh more, some less, than the stated molecular weight) for ease in handling and manufacturing. Other sizes may be used, depending on the desired therapeutic profile (e.g., the duration of sustained release desired, the effects, if any on biological activity, the ease in handling, the degree or lack of antigenicity and other known effects of the polyethylene glycol to a Therapeutic protein or analog). For example, the polyethylene glycol may have an average molecular weight of about 200, 500, 1000, 1500, 2000, 2500, 3000, 3500, 4000, 4500, 5000, 5500, 6000, 6500, 7000, 7500, 8000, 8500, 9000, 9500, 10,000, 10,500, 11,000, 11,500, 12,000, 12,500, 13,000, 13,500, 14,000, 14,500, 15,000, 15,500, 16,000, 16,500, 17,000, 17,500, 18,000, 18,500, 19,000, 19,500, 20,000, 25,000, 30,000, 35,000, 40,000, 45,000, 50,000, 55,000, 60,000, 65,000, 70,000, 75,000, 80,000, 85,000, 90,000, 95,000, or 100,000 kDa.

[0369] As noted above, the polyethylene glycol may have a branched structure. Branched polyethylene glycols are described, for example, in U.S. Pat. No. 5,643,575; Morpurgo et al., Appl. Biochem. Biotechnol. 56:59-72 (1996); Vorobjev et al., Nucleosides Nucleotides 18:2745-2750 (1999); and Caliceti et al., Bioconjug. Chem. 10:638-646 (1999), the disclosures of each of which are incorporated herein by reference.

[0370] The polyethylene glycol molecules (or other chemical moieties) should be attached to the protein with consideration of effects on functional or antigenic domains of the protein. There are a number of attachment methods available to those skilled in the art, such as, for example, the method disclosed in EP 0 401 384 (coupling PEG to G-CSF), herein incorporated by reference; see also Malik et al., Exp. Hematol. 20:1028-1035 (1992), reporting pegylation of GM-CSF using tresyl chloride. For example, polyethylene glycol may be covalently bound through amino acid residues via reactive group, such as a free amino or carboxyl group. Reactive groups are those to which an activated polyethylene glycol molecule may be bound. The amino acid residues having a free amino group may include lysine residues and the N-terminal amino acid residues; those having a free carboxyl group may include aspartic acid residues glutamic acid residues and the C-terminal amino acid residue. Sulfhydryl groups may also be used as a reactive group for attaching the polyethylene glycol molecules. Preferred for therapeutic purposes is attachment at an amino group, such as attachment at the N-terminus or lysine group.

[0371] As suggested above, polyethylene glycol may be attached to proteins via linkage to any of a number of amino acid residues. For example, polyethylene glycol can be linked to proteins via covalent bonds to lysine, histidine, aspartic acid, glutamic acid, or cysteine residues. One or more reaction chemistries may be employed to attach polyethylene glycol to specific amino acid residues (e.g., lysine, histidine, aspartic acid, glutamic acid, or cysteine) of the protein or to more than one type of amino acid residue (e.g., lysine, histidine, aspartic acid, glutamic acid, cysteine and combinations thereof) of the protein.

[0372] One may specifically desire proteins chemically modified at the N-terminus. Using polyethylene glycol as an illustration of the present composition, one may select from a variety of polyethylene glycol molecules (by molecular weight, branching, etc.), the proportion of polyethylene glycol molecules to protein (polypeptide) molecules in the reaction mix, the type of pegylation reaction to be performed, and the method of obtaining the selected N-terminally pegylated protein. The method of obtaining the N-terminally pegylated preparation (i.e., separating this moiety from other monopegylated moieties if necessary) may be by purification of the N-terminally pegylated material from a population of pegylated protein molecules. Selective proteins chemically modified at the N-terminus modification may be accomplished by reductive alkylation which exploits differential reactivity of different types of primary amino groups (lysine versus the N-terminal) available for derivatization in a particular protein. Under the appropriate reaction conditions, substantially selective derivatization of the protein at the N-terminus with a carbonyl group containing polymer is achieved.

[0373] As indicated above, pegylation of the albumin fusion proteins of the invention may be accomplished by any number of means. For example, polyethylene glycol may be attached to the albumin fusion protein either directly or by an intervening linker. Linkerless systems for attaching polyethylene glycol to proteins are described in Delgado et al., Crit. Rev. Thera. Drug Carrier Sys. 9:249-304 (1992); Francis et al., Intern. J. of Hematol. 68:1-18 (1998); U.S. Pat. No. 4,002,531; U.S. Pat. No. 5,349,052; WO 95/06058; and WO 98/32466, the disclosures of each of which are incorporated herein by reference.

[0374] One system for attaching polyethylene glycol directly to amino acid residues of proteins without an intervening linker employs tresylated MPEG, which is produced by the modification of monmethoxy polyethylene glycol (MPEG) using tresylchloride (ClSO₂CH₂CF₃). Upon reaction of protein with tresylated MPEG, polyethylene glycol is directly attached to amine groups of the protein. Thus, the invention includes protein-polyethylene glycol conjugates produced by reacting proteins of the invention with a polyethylene glycol molecule having a 2,2,2-trifluoreothane sulphonyl group.

[0375] Polyethylene glycol can also be attached to proteins using a number of different intervening linkers. For example, U.S. Pat. No. 5,612,460, the entire disclosure of which is incorporated herein by reference, discloses urethane linkers for connecting polyethylene glycol to proteins. Protein-polyethylene glycol conjugates wherein the polyethylene glycol is attached to the protein by a linker can also be produced by reaction of proteins with compounds such as MPEG-succinimidylsuccinate, MPEG activated with 1,1′-carbonyldiimidazole, MPEG-2,4,5-trichloropenylcarbonate, MPEG-p-nitrophenolcarbonate, and various MPEG-succinate derivatives. A number of additional polyethylene glycol derivatives and reaction chemistries for attaching polyethylene glycol to proteins are described in International Publication No. WO 98/32466, the entire disclosure of which is incorporated herein by reference. Pegylated protein products produced using the reaction chemistries set out herein are included within the scope of the invention.

[0376] The number of polyethylene glycol moieties attached to each albumin fusion protein of the invention (i.e., the degree of substitution) may also vary. For example, the pegylated proteins of the invention may be linked, on average, to 1, 2, 3, 4, 5, 6, 7, 8, 9, 10, 12, 15, 17, 20, or more polyethylene glycol molecules. Similarly, the average degree of substitution within ranges such as 1-3, 2-4, 3-5, 4-6, 5-7, 6-8, 7-9, 8-10, 9-11, 10-12, 11-13, 12-14, 13-15, 14-16, 15-17, 16-18, 17-19, or 18-20 polyethylene glycol moieties per protein molecule. Methods for determining the degree of substitution are discussed, for example, in Delgado et al., Crit. Rev. Thera. Drug Carrier Sys. 9:249-304 (1992).

[0377] The polypeptides of the invention can be recovered and purified from chemical synthesis and recombinant cell cultures by standard methods which include, but are not limited to, ammonium sulfate or ethanol precipitation, acid extraction, anion or cation exchange chromatography, phosphocellulose chromatography, hydrophobic interaction chromatography, affinity chromatography, hydroxylapatite chromatography and lectin chromatography. Most preferably, high performance liquid chromatography (“HPLC”) is employed for purification. Well known techniques for refolding protein may be employed to regenerate active conformation when the polypeptide is denatured during isolation and/or purification.

[0378] The presence and quantity of albumin fusion proteins of the invention may be determined using ELISA, a well known immunoassay known in the art. In one ELISA protocol that would be useful for detecting/quantifying albumin fusion proteins of the invention, comprises the steps of coating an ELISA plate with an anti-human serum albumin antibody, blocking the plate to prevent non-specific binding, washing the ELISA plate, adding a solution containing the albumin fusion protein of the invention (at one or more different concentrations), adding a secondary anti-Therapeutic protein specific antibody coupled to a detectable label (as described herein or otherwise known in the art), and detecting the presence of the secondary antibody. In an alternate version of this protocol, the ELISA plate might be coated with the anti-Therapeutic protein specific antibody and the labeled secondary reagent might be the anti-human albumin specific antibody.

[0379] Uses of the Polynucleotides

[0380] Each of the polynucleotides identified herein can be used in numerous ways as reagents. The following description should be considered exemplary and utilizes known techniques.

[0381] The polynucleotides of the present invention are useful to produce the albumin fusion proteins of the invention. As described in more detail below, polynucleotides of the invention (encoding albumin fusion proteins) may be used in recombinant DNA methods useful in genetic engineering to make cells, cell lines, or tissues that express the albumin fusion protein encoded by the polynucleotides encoding albumin fusion proteins of the invention.

[0382] Polynucleotides of the present invention are also useful in gene therapy. One goal of gene therapy is to insert a normal gene into an organism having a defective gene, in an effort to correct the genetic defect. The polynucleotides disclosed in the present invention offer a means of targeting such genetic defects in a highly accurate manner. Another goal is to insert a new gene that was not present in the host genome, thereby producing a new trait in the host cell. Additional non-limiting examples of gene therapy methods encompassed by the present invention are more thoroughly described elsewhere herein (see, e.g., the sections labeled “Gene Therapy”, and Examples 17 and 18).

[0383] Uses of the Polypeptides

[0384] Each of the polypeptides identified herein can be used in numerous ways. The following description should be considered exemplary and utilizes known techniques.

[0385] Albumin fusion proteins of the invention are useful to provide immunological probes for differential identification of the tissue(s) (e.g., immunohistochemistry assays such as, for example, ABC immunoperoxidase (Hsu et al., J. Histochem. Cytochem. 29:577-580 (1981)) or cell type(s) (e.g., immunocytochemistry assays).

[0386] Albumin fusion proteins can be used to assay levels of polypeptides in a biological sample using classical immunohistological methods known to those of skill in the art (e.g., see Jalkanen, et al., J. Cell. Biol. 101:976-985 (1985); Jalkanen, et al., J. Cell. Biol. 105:3087-3096 (1987)). Other methods useful for detecting protein gene expression include immunoassays, such as the enzyme linked immunosorbent assay (ELISA) and the radioimmunoassay (RIA). Suitable assay labels are known in the art and include enzyme labels, such as, glucose oxidase; radioisotopes, such as iodine (¹³¹I, ¹²⁵I, ¹²³I, ¹²¹I), carbon (¹⁴C), sulfur (³⁵S), tritium (³H), indium (^{115m}In, ^{113m}In, ¹¹²In, ¹¹¹In) and technetium (⁹⁹Tc, ^{99m}Tc), thallium (²⁰¹Ti), gallium (⁶⁸Ga, ⁶⁷Ga), palladium (¹⁰³Pd), molybdenum (⁹⁹Mo), xenon (¹³³Xe), fluorine (¹⁸F), ¹⁵³Sm, ¹⁷⁷Lu, ¹⁵⁹Gd, ¹⁴⁹Pm, ¹⁴⁰La, ¹⁷⁵Yb, ¹⁶⁶Ho, ⁹⁰Y, ⁴⁷Sc, ¹⁸⁶Re, ¹⁸⁸Re, ¹⁴²Pr, ¹⁰⁵Rh, ⁹⁷Ru; luminescent labels, such as luminol; and fluorescent labels, such as fluorescein and rhodamine, and biotin.

[0387] Albumin fusion proteins of the invention can also be detected in vivo by imaging. Labels or markers for in vivo imaging of protein include those detectable by X-radiography, nuclear magnetic resonance (NMR) or electron spin relaxtion (ESR). For X-radiography, suitable labels include radioisotopes such as barium or cesium, which emit detectable radiation but are not overtly harmful to the subject. Suitable markers for NMR and ESR include those with a detectable characteristic spin, such as deuterium, which may be incorporated into the albumin fusion protein by labeling of nutrients given to a cell line expressing the albumin fusion protein of the invention.

[0388] An albumin fusion protein which has been labeled with an appropriate detectable imaging moiety, such as a radioisotope (for example, ¹³¹I, ¹¹²In, ^{99m}Tc, (¹³¹I, ¹²⁵I, ¹²³I, ¹²¹I), carbon (¹⁴C), sulfur (³⁵S), tritium (³H), indium (^{115m}In, ^{113m}In, ¹¹²In, ¹¹¹In), and technetium (⁹⁹Tc, ^{99m}Tc), thallium (²⁰¹Ti), gallium (⁶⁸Ga, ⁶⁷Ga), palladium (¹⁰³Pd), molybdenum (⁹⁹Mo), xenon (¹³³Xe), fluorine (¹⁸F, ¹⁵³Sm, ¹⁷⁷Lu, ¹⁵⁹Gd, ¹⁴⁹Pm, ¹⁴⁰La, ¹⁷⁵Yb, ¹⁶⁶Ho, ⁹⁰Y, ⁴⁷Sc, ¹⁸⁶Re, ¹⁸⁸Re, ¹⁴²Pr, ¹⁰⁵Rh, ⁹⁷Ru), a radio-opaque substance, or a material detectable by nuclear magnetic resonance, is introduced (for example, parenterally, subcutaneously or intraperitoneally) into the mammal to be examined for immune system disorder. It will be understood in the art that the size of the subject and the imaging system used will determine the quantity of imaging moiety needed to produce diagnostic images. In the case of a radioisotope moiety, for a human subject, the quantity of radioactivity injected will normally range from about 5 to 20 millicuries of ^{99m}Tc. The labeled albumin fusion protein will then preferentially accumulate at locations in the body (e.g., organs, cells, extracellular spaces or matrices) where one or more receptors, ligands or substrates (corresponding to that of the Therapeutic protein used to make the albumin fusion protein of the invention) are located. Alternatively, in the case where the albumin fusion protein comprises at least a fragment or variant of a Therapeutic antibody, the labeled albumin fusion protein will then preferentially accumulate at the locations in the body (e.g., organs, cells, extracellular spaces or matrices) where the polypeptides/epitopes corresponding to those bound by the Therapeutic antibody (used to make the albumin fusion protein of the invention) are located. In vivo tumor imaging is described in S. W. Burchiel et al., “Immunopharmacokinetics of Radiolabeled Antibodies and Their Fragments” (Chapter 13 in Tumor Imaging: The Radiochemical Detection of Cancer, S. W. Burchiel and B. A. Rhodes, eds., Masson Publishing Inc. (1982)). The protocols described therein could easily be modified by one of skill in the art for use with the albumin fusion proteins of the invention.

[0389] In one embodiment, the invention provides a method for the specific delivery of albumin fusion proteins of the invention to cells by administering albumin fusion proteins of the invention (e.g., polypeptides encoded by polynucleotides encoding albumin fusion proteins of the invention and/or antibodies) that are associated with heterologous polypeptides or nucleic acids. In one example, the invention provides a method for delivering a Therapeutic protein into the targeted cell. In another example, the invention provides a method for delivering a single stranded nucleic acid (e.g., antisense or ribozymes) or double stranded nucleic acid (e.g., DNA that can integrate into the cell's genome or replicate episomally and that can be transcribed) into the targeted cell.

[0390] In another embodiment, the invention provides a method for the specific destruction of cells (e.g., the destruction of tumor cells) by administering albumin fusion proteins of the invention in association with toxins or cytotoxic prodrugs.

[0391] By “toxin” is meant one or more compounds that bind and activate endogenous cytotoxic effector systems, radioisotopes, holotoxins, modified toxins, catalytic subunits of toxins, or any molecules or enzymes not normally present in or on the surface of a cell that under defined conditions cause the cell's death. Toxins that may be used according to the methods of the invention include, but are not limited to, radioisotopes known in the art, compounds such as, for example, antibodies (or complement fixing containing portions thereof) that bind an inherent or induced endogenous cytotoxic effector system, thymidine kinase, endonuclease, RNAse, alpha toxin, ricin, abrin, Pseudomonas exotoxin A, diphtheria toxin, saporin, momordin, gelonin, pokeweed antiviral protein, alpha-sarcin and cholera toxin. “Toxin” also includes a cytostatic or cytocidal agent, a therapeutic agent or a radioactive metal ion, e.g., alpha-emitters such as, for example, ²¹³Bi, or other radioisotopes such as, for example, ¹⁰³Pd, ¹³³Xe, ¹³¹I, ⁶⁸Ge, ⁵⁷Co, ⁶⁵Zn, ⁸⁵Sr, ³²P, ³⁵S, ⁹⁰Y, ¹⁵³Sm, ¹⁵³Gd, ¹⁶⁹Yb, ⁵¹Cr, ⁵⁴Mn, ⁷⁵Se, ¹¹³Sn, ⁹⁰Yttrium, ¹¹⁷Tin, ¹⁸⁶Rhenium, ¹⁶⁶Holmium, and ¹⁸⁸Rhenium; luminescent labels, such as luminol; and fluorescent labels, such as fluorescein and rhodamine, and biotin. In a specific embodiment, the invention provides a method for the specific destruction of cells (e.g., the destruction of tumor cells) by administering polypeptides of the invention or antibodies of the invention in association with the radioisotope ⁹⁰Y. In another specific embodiment, the invention provides a method for the specific destruction of cells (e.g., the destruction of tumor cells) by administering polypeptides of the invention or antibodies of the invention in association with the radioisotope ¹¹¹In. In a further specific embodiment, the invention provides a method for the specific destruction of cells (e.g., the destruction of tumor cells) by administering polypeptides of the invention or antibodies of the invention in association with the radioisotope ¹³¹I.

[0392] Techniques known in the art may be applied to label polypeptides of the invention. Such techniques include, but are not limited to, the use of bifunctional conjugating agents (see e.g., U.S. Pat. Nos. 5,756,065; 5,714,631; 5,696,239; 5,652,361; 5,505,931; 5,489,425; 5,435,990; 5,428,139; 5,342,604; 5,274,119; 4,994,560; and 5,808,003; the contents of each of which are hereby incorporated by reference in its entirety).

[0393] The albumin fusion proteins of the present invention are useful for diagnosis, treatment, prevention and/or prognosis of various disorders in mammals, preferably humans. Such disorders include, but are not limited to, those described herein under the section heading “Biological Activities,” below.

[0394] Thus, the invention provides a diagnostic method of a disorder, which involves (a) assaying the expression level of a certain polypeptide in cells or body fluid of an individual using an albumin fusion protein of the invention; and (b) comparing the assayed polypeptide expression level with a standard polypeptide expression level, whereby an increase or decrease in the assayed polypeptide expression level compared to the standard expression level is indicative of a disorder. With respect to cancer, the presence of a relatively high amount of transcript in biopsied tissue from an individual may indicate a predisposition for the development of the disease, or may provide a means for detecting the disease prior to the appearance of actual clinical symptoms. A more definitive diagnosis of this type may allow health professionals to employ preventative measures or aggressive treatment earlier thereby preventing the development or further progression of the cancer.

[0395] Moreover, albumin fusion proteins of the present invention can be used to treat or prevent diseases or conditions such as, for example, neural disorders, immune system disorders, muscular disorders, reproductive disorders, gastrointestinal disorders, pulmonary disorders, cardiovascular disorders, renal disorders, proliferative disorders, and/or cancerous diseases and conditions. For example, patients can be administered a polypeptide of the present invention in an effort to replace absent or decreased levels of the polypeptide (e.g., insulin), to supplement absent or decreased levels of a different polypeptide (e.g., hemoglobin S for hemoglobin B, SOD, catalase, DNA repair proteins), to inhibit the activity of a polypeptide (e.g., an oncogene or tumor supressor), to activate the activity of a polypeptide (e.g., by binding to a receptor), to reduce the activity of a membrane bound receptor by competing with it for free ligand (e.g., soluble TNF receptors used in reducing inflammation), or to bring about a desired response (e.g., blood vessel growth inhibition, enhancement of the immune response to proliferative cells or tissues).

[0396] In particular, albumin fusion proteins comprising of at least a fragment or variant of a Therapeutic antibody can also be used to treat disease (as described supra, and elsewhere herein). For example, administration of an albumin fusion protein comprising of at least a fragment or variant of a Therapeutic antibody can bind, and/or neutralize the polypeptide to which the Therapeutic antibody used to make the albumin fusion protein specifically binds, and/or reduce overproduction of the polypeptide to which the Therapeutic antibody used to make the albumin fusion protein specifically binds. Similarly, administration of an albumin fusion protein comprising of at least a fragment or variant of a Therapeutic antibody can activate the polypeptide to which the Therapeutic antibody used to make the albumin fusion protein specifically binds, by binding to the polypeptide bound to a membrane (receptor).

[0397] At the very least, the albumin fusion proteins of the invention of the present invention can be used as molecular weight markers on SDS-PAGE gels or on molecular sieve gel filtration columns using methods well known to those of skill in the art. Albumin fusion proteins of the invention can also be used to raise antibodies, which in turn may be used to measure protein expression of the Therapeutic protein, albumin protein, and/or the albumin fusion protein of the invention from a recombinant cell, as a way of assessing transformation of the host cell, or in a biological sample. Moreover, the albumin fusion proteins of the present invention can be used to test the biological activities described herein.

[0398] Diagnostic Assays

[0399] The compounds of the present invention are useful for diagnosis, treatment, prevention and/or prognosis of various disorders in mammals, preferably humans. Such disorders include, but are not limited to, those described for each Therapeutic protein in the corresponding row of Table 1 and herein under the section headings “Immune Activity,” “Blood Related Disorders,” “Hyperproliferative Disorders,” “Renal Disorders,” “Cardiovascular Disorders,” “Respiratory Disorders,” “Anti-Angiogenesis Activity,” “Diseases at the Cellular Level,” “Wound Healing and Epithelial Cell Proliferation,” “Neural Activity and Neurological Diseases,” “Endocrine Disorders,” “Reproductive System Disorders,” “Infectious Disease,” “Regeneration,” and/or “Gastrointestinal Disorders,” infra.

[0400] For a number of disorders, substantially altered (increased or decreased) levels of gene expression can be detected in tissues, cells or bodily fluids (e.g., sera, plasma, urine, semen, synovial fluid or spinal fluid) taken from an individual having such a disorder, relative to a “standard” gene expression level, that is, the expression level in tissues or bodily fluids from an individual not having the disorder. Thus, the invention provides a diagnostic method useful during diagnosis of a disorder, which involves measuring the expression level of the gene encoding a polypeptide in tissues, cells or body fluid from an individual and comparing the measured gene expression level with a standard gene expression level, whereby an increase or decrease in the gene expression level(s) compared to the standard is indicative of a disorder. These diagnostic assays may be performed in vivo or in vitro, such as, for example, on blood samples, biopsy tissue or autopsy tissue.

[0401] The present invention is also useful as a prognostic indicator, whereby patients exhibiting enhanced or depressed gene expression will experience a worse clinical outcome

[0402] By “assaying the expression level of the gene encoding a polypeptide” is intended qualitatively or quantitatively measuring or estimating the level of a particular polypeptide (e.g. a polypeptide corresponding to a Therapeutic protein disclosed in Table 1) or the level of the mRNA encoding the polypeptide of the invention in a first biological sample either directly (e.g., by determining or estimating absolute protein level or mRNA level) or relatively (e.g., by comparing to the polypeptide level or mRNA level in a second biological sample). Preferably, the polypeptide expression level or mRNA level in the first biological sample is measured or estimated and compared to a standard polypeptide level or mRNA level, the standard being taken from a second biological sample obtained from an individual not having the disorder or being determined by averaging levels from a population of individuals not having the disorder. As will be appreciated in the art, once a standard polypeptide level or mRNA level is known, it can be used repeatedly as a standard for comparison.

[0403] By “biological sample” is intended any biological sample obtained from an individual, cell line, tissue culture, or other source containing polypeptides of the invention (including portions thereof) or mRNA. As indicated, biological samples include body fluids (such as sera, plasma, urine, synovial fluid and spinal fluid) and tissue sources found to express the full length or fragments thereof of a polypeptide or mRNA. Methods for obtaining tissue biopsies and body fluids from mammals are well known in the art. Where the biological sample is to include mRNA, a tissue biopsy is the preferred source.

[0404] Total cellular RNA can be isolated from a biological sample using any suitable technique such as the single-step guanidinium-thiocyanate-phenol-chloroform method described in Chomczynski and Sacchi, Anal. Biochem. 162:156-159 (1987). Levels of mRNA encoding the polypeptides of the invention are then assayed using any appropriate method. These include Northern blot analysis, S1 nuclease mapping, the polymerase chain reaction (PCR), reverse transcription in combination with the polymerase chain reaction (RT-PCR), and reverse transcription in combination with the ligase chain reaction (RT-LCR).

[0405] The present invention also relates to diagnostic assays such as quantitative and diagnostic assays for detecting levels of polypeptides that bind to, are bound by, or associate with albumin fusion proteins of the invention, in a biological sample (e.g., cells and tissues), including determination of normal and abnormal levels of polypeptides. Thus, for instance, a diagnostic assay in accordance with the invention for detecting abnormal expression of polypeptides that bind to, are bound by, or associate with albumin fusion proteins compared to normal control tissue samples may be used to detect the presence of tumors. Assay techniques that can be used to determine levels of a polypeptide that bind to, are bound by, or associate with albumin fusion proteins of the present invention in a sample derived from a host are well-known to those of skill in the art. Such assay methods include radioimmunoassays, competitive-binding assays, Western Blot analysis and ELISA assays. Assaying polypeptide levels in a biological sample can occur using any art-known method.

[0406] Assaying polypeptide levels in a biological sample can occur using a variety of techniques. For example, polypeptide expression in tissues can be studied with classical immunohistological methods (Jalkanen et al., J. Cell. Biol. 101:976-985 (1985); Jalkanen, M., et al., J. Cell. Biol. 105:3087-3096 (1987)). Other methods useful for detecting polypeptide gene expression include immunoassays, such as the enzyme linked immunosorbent assay (ELISA) and the radioimmunoassay (RIA). Suitable antibody assay labels are known in the art and include enzyme labels, such as, glucose oxidase, and radioisotopes, such as iodine (¹²⁵I, ¹²¹I), carbon (¹⁴C), sulfur (³⁵S), tritium (³H), indium (¹¹²In), and technetium (^{99m}Tc), and fluorescent labels, such as fluorescein and rhodamine, and biotin.

[0407] The tissue or cell type to be analyzed will generally include those which are known, or suspected, to express the gene of interest (such as, for example, cancer). The protein isolation methods employed herein may, for example, be such as those described in Harlow and Lane (Harlow, E. and Lane, D., 1988, “Antibodies: A Laboratory Manual”, Cold Spring Harbor Laboratory Press, Cold Spring Harbor, N.Y.), which is incorporated herein by reference in its entirety. The isolated cells can be derived from cell culture or from a patient. The analysis of cells taken from culture may be a necessary step in the assessment of cells that could be used as part of a cell-based gene therapy technique or, alternatively, to test the effect of compounds on the expression of the gene.

[0408] For example, albumin fusion proteins may be used to quantitatively or qualitatively detect the presence of polypeptides that bind to, are bound by, or associate with albumin fusion proteins of the present invention. This can be accomplished, for example, by immunofluorescence techniques employing a fluorescently labeled albumin fusion protein coupled with light microscopic, flow cytometric, or fluorimetric detection.

[0409] In a preferred embodiment, albumin fusion proteins comprising at least a fragment or variant of an antibody that specifically binds at least a Therapeutic protein disclosed herein (e.g., the Therapeutic proteins disclosed in Table 1) or otherwise known in the art may be used to quantitatively or qualitatively detect the presence of gene products or conserved variants or peptide fragments thereof. This can be accomplished, for example, by immunofluorescence techniques employing a fluorescently labeled antibody coupled with light microscopic, flow cytometric, or fluorimetric detection.

[0410] The albumin fusion proteins of the present invention may, additionally, be employed histologically, as in immunofluorescence, immunoelectron microscopy or non-immunological assays, for in situ detection of polypeptides that bind to, are bound by, or associate with an albumin fusion protein of the present invention. In situ detection may be accomplished by removing a histological specimen from a patient, and applying thereto a labeled antibody or polypeptide of the present invention. The albumin fusion proteins are preferably applied by overlaying the labeled albumin fusion proteins onto a biological sample. Through the use of such a procedure, it is possible to determine not only the presence of the polypeptides that bind to, are bound by, or associate with albumin fusion proteins, but also its distribution in the examined tissue. Using the present invention, those of ordinary skill will readily perceive that any of a wide variety of histological methods (such as staining procedures) can be modified in order to achieve such in situ detection.

[0411] Immunoassays and non-immunoassays that detect polypeptides that bind to, are bound by, or associate with albumin fusion proteins will typically comprise incubating a sample, such as a biological fluid, a tissue extract, freshly harvested cells, or lysates of cells which have been incubated in cell culture, in the presence of a detectably labeled antibody capable of binding gene products or conserved variants or peptide fragments thereof, and detecting the bound antibody by any of a number of techniques well-known in the art.

[0412] The biological sample may be brought in contact with and immobilized onto a solid phase support or carrier such as nitrocellulose, or other solid support which is capable of immobilizing cells, cell particles or soluble proteins. The support may then be washed with suitable buffers followed by treatment with the detectably labeled albumin fusion protein of the invention. The solid phase support may then be washed with the buffer a second time to remove unbound antibody or polypeptide. Optionally the antibody is subsequently labeled. The amount of bound label on solid support may then be detected by conventional means.

[0413] By “solid phase support or carrier” is intended any support capable of binding a polypeptide (e.g., an albumin fusion protein, or polypeptide that binds, is bound by, or associates with an albumin fusion protein of the invention.) Well-known supports or carriers include glass, polystyrene, polypropylene, polyethylene, dextran, nylon, amylases, natural and modified celluloses, polyacrylamides, gabbros, and magnetite. The nature of the carrier can be either soluble to some extent or insoluble for the purposes of the present invention. The support material may have virtually any possible structural configuration so long as the coupled molecule is capable of binding to a polypeptide. Thus, the support configuration may be spherical, as in a bead, or cylindrical, as in the inside surface of a test tube, or the external surface of a rod. Alternatively, the surface may be flat such as a sheet, test strip, etc. Preferred supports include polystyrene beads. Those skilled in the art will know many other suitable carriers for binding antibody or antigen, or will be able to ascertain the same by use of routine experimentation.

[0414] The binding activity of a given lot of albumin fusion protein may be determined according to well known methods. Those skilled in the art will be able to determine operative and optimal assay conditions for each determination by employing routine experimentation.

[0415] In addition to assaying polypeptide levels in a biological sample obtained from an individual, polypeptide can also be detected in vivo by imaging. For example, in one embodiment of the invention, albumin fusion proteins of the invention are used to image diseased or neoplastic cells.

[0416] Labels or markers for in vivo imaging of albumin fusion proteins of the invention include those detectable by X-radiography, NMR, MRI, CAT-scans or ESR. For X-radiography, suitable labels include radioisotopes such as barium or cesium, which emit detectable radiation but are not overtly harmful to the subject. Suitable markers for NMR and ESR include those with a detectable characteristic spin, such as deuterium, which may be incorporated into the albumin fusion protein by labeling of nutrients of a cell line (or bacterial or yeast strain) engineered.

[0417] Additionally, albumin fusion proteins of the invention whose presence can be detected, can be administered. For example, albumin fusion proteins of the invention labeled with a radio-opaque or other appropriate compound can be administered and visualized in vivo, as discussed, above for labeled antibodies. Further, such polypeptides can be utilized for in vitro diagnostic procedures.

[0418] A polypeptide-specific antibody or antibody fragment which has been labeled with an appropriate detectable imaging moiety, such as a radioisotope (for example, ¹³¹I, ¹¹²In, ^{99m}Tc), a radio-opaque substance, or a material detectable by nuclear magnetic resonance, is introduced (for example, parenterally, subcutaneously or intraperitoneally) into the mammal to be examined for a disorder. It will be understood in the art that the size of the subject and the imaging system used will determine the quantity of imaging moiety needed to produce diagnostic images. In the case of a radioisotope moiety, for a human subject, the quantity of radioactivity injected will normally range from about 5 to 20 millicuries of ^{99m}Tc. The labeled albumin fusion protein will then preferentially accumulate at the locations in the body which contain a polypeptide or other substance that binds to, is bound by or associates with an albumin fusion protein of the present invention. In vivo tumor imaging is described in S. W. Burchiel et al., “Immunopharmacokinetics of Radiolabeled Antibodies and Their Fragments” (Chapter 13 in Tumor Imaging: The Radiochemical Detection of Cancer, S. W. Burchiel and B. A. Rhodes, eds., Masson Publishing Inc. (1982)).

[0419] One of the ways in which an albumin fusion protein of the present invention can be detectably labeled is by linking the same to a reporter enzyme and using the linked product in an enzyme immunoassay (EIA) (Voller, A., “The Enzyme Linked Immunosorbent Assay (ELISA)”, 1978, Diagnostic Horizons 2:1-7, Microbiological Associates Quarterly Publication, Walkersville, Md.); Voller et al., J. Clin. Pathol. 31:507-520 (1978); Butler, J. E., Meth. Enzymol. 73:482-523 (1981); Maggio, E. (ed.), 1980, Enzyme Immunoassay, CRC Press, Boca Raton, Fla.; Ishikawa, E. et al., (eds.), 1981, Enzyme Immunoassay, Kgaku Shoin, Tokyo). The reporter enzyme which is bound to the antibody will react with an appropriate substrate, preferably a chromogenic substrate, in such a manner as to produce a chemical moiety which can be detected, for example, by spectrophotometric, fluorimetric or by visual means. Reporter enzymes which can be used to detectably label the antibody include, but are not limited to, malate dehydrogenase, staphylococcal nuclease, delta-5-steroid isomerase, yeast alcohol dehydrogenase, alpha-glycerophosphate, dehydrogenase, triose phosphate isomerase, horseradish peroxidase, alkaline phosphatase, asparaginase, glucose oxidase, beta-galactosidase, ribonuclease, urease, catalase, glucose-6-phosphate dehydrogenase, glucoamylase and acetylcholinesterase. Additionally, the detection can be accomplished by colorimetric methods which employ a chromogenic substrate for the reporter enzyme. Detection may also be accomplished by visual comparison of the extent of enzymatic reaction of a substrate in comparison with similarly prepared standards.

[0420] Albumin fusion proteins may also be radiolabelled and used in any of a variety of other immunoassays. For example, by radioactively labeling the albumin fusion proteins, it is possible to the use the albumin fusion proteins in a radioimmunoassay (RIA) (see, for example, Weintraub, B., Principles of Radioimmunoassays, Seventh Training Course on Radioligand Assay Techniques, The Endocrine Society, March, 1986, which is incorporated by reference herein). The radioactive isotope can be detected by means including, but not limited to, a gamma counter, a scintillation counter, or autoradiography.

[0421] It is also possible to label the albumin fusion proteins with a fluorescent compound. When the fluorescently labeled antibody is exposed to light of the proper wave length, its presence can then be detected due to fluorescence. Among the most commonly used fluorescent labeling compounds are fluorescein isothiocyanate, rhodamine, phycoerythrin, phycocyanin, allophycocyanin, ophthaldehyde and fluorescamine.

[0422] The albumin fusion protein can also be detectably labeled using fluorescence emitting metals such as ¹⁵²Eu, or others of the lanthanide series. These metals can be attached to the antibody using such metal chelating groups as diethylenetriaminepentacetic acid (DTPA) or ethylenediaminetetraacetic acid (EDTA).

[0423] The albumin fusion proteins can also can be detectably labeled by coupling it to a chemiluminescent compound. The presence of the chemiluminescent-tagged albumin fusion protein is then determined by detecting the presence of luminescence that arises during the course of a chemical reaction. Examples of particularly useful chemiluminescent labeling compounds are luminol, isoluminol, theromatic acridinium ester, imidazole, acridinium salt and oxalate ester.

[0424] Likewise, a bioluminescent compound may be used to label albumin fusion proteins of the present invention. Bioluminescence is a type of chemiluminescence found in biological systems in, which a catalytic protein increases the efficiency of the chemiluminescent reaction. The presence of a bioluminescent protein is determined by detecting the presence of luminescence. Important bioluminescent compounds for purposes of labeling are luciferin, luciferase and aequorin.

[0425] Transgenic Organisms

[0426] Transgenic organisms that express the albumin fusion proteins of the invention are also included in the invention. Transgenic organisms are genetically modified organisms into which recombinant, exogenous or cloned genetic material has been transferred. Such genetic material is often referred to as a transgene. The nucleic acid sequence of the transgene may include one or more transcriptional regulatory sequences and other nucleic acid sequences such as introns, that may be necessary for optimal expression and secretion of the encoded protein. The transgene may be designed to direct the expression of the encoded protein in a manner that facilitates its recovery from the organism or from a product produced by the organism, e.g. from the milk, blood, urine, eggs, hair or seeds of the organism. The transgene may consist of nucleic acid sequences derived from the genome of the same species or of a different species than the species of the target animal. The transgene may be integrated either at a locus of a genome where that particular nucleic acid sequence is not otherwise normally found or at the normal locus for the transgene.

[0427] The term “germ cell line transgenic organism” refers to a transgenic organism in which the genetic alteration or genetic information was introduced into a germ line cell, thereby conferring the ability of the transgenic organism to transfer the genetic information to offspring. If such offspring in fact possess some or all of that alteration or genetic information, then they too are transgenic organisms. The alteration or genetic information may be foreign to the species of organism to which the recipient belongs, foreign only to the particular individual recipient, or may be genetic information already possessed by the recipient. In the last case, the altered or introduced gene may be expressed differently than the native gene.

[0428] A transgenic organism may be a transgenic animal or a transgenic plant. Transgenic animals can be produced by a variety of different methods including transfection, electroporation, microinjection, gene targeting in embryonic stem cells and recombinant viral and retroviral infection (see, e.g., U.S. Pat. No. 4,736,866; U.S. Pat. No. 5,602,307; Mullins et al. (1993) Hypertension 22(4):630-633; Brenin et al. (1997) Surg. Oncol. 6(2)99-110; Tuan (ed.), Recombinant Gene Expression Protocols, Methods in Molecular Biology No. 62, Humana Press (1997)). The method of introduction of nucleic acid fragments into recombination competent mammalian cells can be by any method which favors co-transformation of multiple nucleic acid molecules. Detailed procedures for producing transgenic animals are readily available to one skilled in the art, including the disclosures in U.S. Pat. No. 5,489,743 and U.S. Pat. No. 5,602,307.

[0429] A number of recombinant or transgenic mice have been produced, including those which express an activated oncogene sequence (U.S. Pat. No. 4,736,866); express simian SV40 T-antigen (U.S. Pat. No. 5,728,915); lack the expression of interferon regulatory factor 1 (IRF-1) (U.S. Pat. No. 5,731,490); exhibit dopaminergic dysfunction (U.S. Pat. No. 5,723,719); express at least one human gene which participates in blood pressure control (U.S. Pat. No. 5,731,489); display greater similarity to the conditions existing in naturally occurring Alzheimer's disease (U.S. Pat. No. 5,720,936); have a reduced capacity to mediate cellular adhesion (U.S. Pat. No. 5,602,307); possess a bovine growth hormone gene (Clutter et al. (1996) Genetics 143(4):1753-1760); or, are capable of generating a fully human antibody response (McCarthy (1997) The Lancet 349(9049):405).

[0430] While mice and rats remain the animals of choice for most transgenic experimentation, in some instances it is preferable or even necessary to use alternative animal species. Transgenic procedures have been successfully utilized in a variety of non-murine animals, including sheep, goats, pigs, dogs, cats, monkeys, chimpanzees, hamsters, rabbits, cows and guinea pigs (see, e.g., Kim et al. (1997) Mol. Reprod. Dev. 46(4):515-526; Houdebine (1995) Reprod. Nutr. Dev. 35(6):609-617; Petters (1994) Reprod. Fertil. Dev. 6(5):643-645; Schnieke et al. (1997) Science 278(5346):2130-2133; and Amoah (1997) J. Animal Science 75(2):578-585).

[0431] To direct the secretion of the transgene-encoded protein of the invention into the milk of transgenic mammals, it may be put under the control of a promoter that is preferentially activated in mammary epithelial cells. Promoters that control the genes encoding milk proteins are preferred, for example the promoter for casein, beta lactoglobulin, whey acid protein, or lactalbumin (see, e.g., DiTullio (1992) BioTechnology 10:74-77; Clark et al. (1989) BioTechnology 7:487-492; Gorton et al. (1987) BioTechnology 5:1183-1187; and Soulier et al. (1992) FEBS Letts. 297:13). The transgenic mammals of choice would produce large volumes of milk and have long lactating periods, for example goats, cows, camels or sheep.

[0432] An albumin fusion protein of the invention can also be expressed in a transgenic plant, e.g. a plant in which the DNA transgene is inserted into the nuclear or plastidic genome. Plant transformation procedures used to introduce foreign nucleic acids into plant cells or protoplasts are known in the art (e.g., see Example 19). See, in general, Methods in Enzymology Vol. 153 (“Recombinant DNA Part D”) 1987, Wu and Grossman Eds., Academic Press and European Patent Application EP 693554. Methods for generation of genetically engineered plants are further described in U.S. Pat. No. 5,283,184, U.S. Pat. No. 5,482,852, and European Patent Application EP 693 554, all of which are hereby incorporated by reference.

[0433] Pharmaceutical or Therapeutic Compositions

[0434] The albumin fusion proteins of the invention or formulations thereof may be administered by any conventional method including parenteral (e.g. subcutaneous or intramuscular) injection or intravenous infusion. The treatment may consist of a single dose or a plurality of doses over a period of time.

[0435] While it is possible for an albumin fusion protein of the invention to be administered alone, it is preferable to present it as a pharmaceutical formulation, together with one or more acceptable carriers. The carrier(s) must be “acceptable” in the sense of being compatible with the albumin fusion protein and not deleterious to the recipients thereof. Typically, the carriers will be water or saline which will be sterile and pyrogen free. Albumin fusion proteins of the invention are particularly well suited to formulation in aqueous carriers such as sterile pyrogen free water, saline or other isotonic solutions because of their extended shelf-life in solution. For instance, pharmaceutical compositions of the invention may be formulated well in advance in aqueous form, for instance, weeks or months or longer time periods before being dispensed.

[0436] For example, wherein the Therapeutic protein is hGH, EPO, alpha-IFN or beta-IFN, formulations containing the albumin fusion protein may be prepared taking into account the extended shelf-life of the albumin fusion protein in aqueous formulations. As exhibited in Table 2, most Therapeutic proteins are unstable with short shelf-lives after formulation with an aqueous carrier. As discussed above, the shelf-life of many of these Therapeutic proteins are markedly increased or prolonged after fusion to HA.

TABLE 2

| | | | | Storage Conditions |
|---|---|---|---|---|
| | Tradename, | | | of Non-Fusion |
| Protein | Manufacturer | Route | Formulation | Protein |
| Interferon, | Roferon-A, | sc | sol'n | 4-8° C. |
| alpha-2a | Hoffmann- | im | (vial or pre-filled | |
| | LaRoche | | syringe) | |
| Interferon, | Intron-A, | iv sc | sol'n; | 4-8° C. |
| alpha-2b | Schering Plough | im | powder + dil. | (all preps, before and |
| | | | | after dilution) |
| COMBO | Rebetron | po + | Rebetol capsule + | |
| Interferon | (Intron-A + | sc | Intron-A injection | |
| alpha-2b + | Rebetol) | | | |
| Ribavirin | Schering Plough | | | |
| Interferon, | Infergen | sc | sol'n | 4-8° C. |
| Alphacon-1 | Amgen | | | |
| Interferon, | Wellferon, | sc | sol'n | 4-8° C. |
| alpha-n1, | Wellcome | im | (with albumin “as | |
| Lympho- | | | stablizer”) | |
| blastoid | | | | |
| Interferon, | Avonex, | im | powder + dil. | 4-8° C. |
| beta-1a | Biogen | | (with albumin) | (before and after |
| | | | | dilution) |
| | | | | (Use within 3-6 h of |
| | | | | reconstitution) |
| | Rebif, | sc | sol'n, | |
| | Ares-Serono | | in pre-filled syringe | |
| | (Europe only) | | | |
| Interferon, | Betaseron, | sc | powder + dil. | 4-8° C. |
| beta-1b | Chiron | | (with albumin) | (before and after |
| | (Europe: | | | dilution) |
| | Betaferon) | | | (Use within 3 h of |
| | | | | reconstitution) |
| | | | | Single use vials. |
| Interferon, | Actimmune, | sc | | 4-8° C. |
| Gamma-1b | InterMune | | | (before and after |
| | Pharmaceuticals | | | dilution) |
| | | | | (Use within 3 h of |
| | | | | reconstitution). |
| Growth | Genotropin, | | powder/dil | 4-8° C. |
| Hormone | Pharmacia | | cartridges (single or | (before and after |
| (somatropin) | Upjohn | | multi-use); | dilution); |
| | | | single use | single use MiniQuick |
| | | | MiniQuick injector | Delivery Device |
| | | | | should be |
| | | | | refrigerated until use. |
| | Humatrope, | sc | powder + dil. | 4-8° C. |
| | Eli Lilly | im | (Vial or pen | (before and after |
| | | | cartridge) | dilution) |
| | | | | (Use vials within |
| | | | | 25 h, cartridges |
| | | | | within 28 d, of |
| | | | | reconstitution). |
| | Norditropin, | | | |
| | Novo Nordisk | | | |
| | Pharmaceuticals | | | |
| | Nutropin, | sc | powder + dil. | 4-8° C. |
| | Genentech | | | (stable for 14 d after |
| | | | | dil□n) |
| | | | | (all preps, before and |
| | | | | after dilution) |
| | Nutropin AQ, | sc | sol'n | 4-8° C. |
| | Genentech | | | (Stable for 28 d after |
| | | | | 1st use) |
| | Nutropin Depot, | sc | microsphere | 4-8° C. |
| | Genentech | | suspension as | Single use pkges. |
| | | | powder + dil. | Dose 1-2x/month |
| | | | | (ProLease micro- |
| | | | | encapsulation |
| | | | | technol.) |
| | Saizen, | sc | powder + dil. | Powder “should be |
| | (Serono) | im | | stored at Rm Temp”. |
| | | | | After reconstitution |
| | | | | store 4-8° C. for up to |
| | | | | 14 d. |
| | Serostim, | | | Powder “should be |
| | Serono | | | stored at Rm Temp”. |
| | | | | After reconstitution |
| | | | | store in 4-8° C. for up |
| | | | | to 14 d. |
| hGH, with | Protropin, | sc | powder + dil. | 4-8° C. |
| N-term. Met | Genentech | im | | (all preps, before |
| (somatrem) | | | | and after dilution) |
| Erythropoietin | Epogen, | iv | sol'n | 4-8° C. |
| (Epoetin alfa) | Amgen | sc | | (use within 21 d of |
| | | | | first use) |
| | | | | (Single & multi-dose |
| | | | | vials) |
| | Procrit, | iv | sol'n | 4-8° C. |
| | Amgen | sc | | (use within 21 d of |
| | | | | first use) |
| | | | | (Single & multi-dose |
| | | | | vials) |

[0437] In instances where aerosol administration is appropriate, the albumin fusion proteins of the invention can be formulated as aerosols using standard procedures. The term “aerosol” includes any gas-borne suspended phase of an albumin fusion protein of the instant invention which is capable of being inhaled into the bronchioles or nasal passages. Specifically, aerosol includes a gas-borne suspension of droplets of an albumin fusion protein of the instant invention, as may be produced in a metered dose inhaler or nebulizer, or in a mist sprayer. Aerosol also includes a dry powder composition of a compound of the instant invention suspended in air or other carrier gas, which may be delivered by insufflation from an inhaler device, for example. See Ganderton & Jones, Drug Delivery to the Respiratory Tract, Ellis Horwood (1987); Gonda (1990) Critical Reviews in Therapeutic Drug Carrier Systems 6:273-313; and Raeburn et al., (1992) Pharmacal. Toxicol. Methods 27:143-159.

[0438] The formulations of the invention are also typically non-immunogenic, in part, because of the use of the components of the albumin fusion protein being derived from the proper species. For instance, for human use, both the Therapeutic protein and albumin portions of the albumin fusion protein will typically be human. In some cases, wherein either component is non human-derived, that component may be humanized by substitution of key amino acids so that specific epitopes appear to the human immune system to be human in nature rather than foreign.

[0439] The formulations may conveniently be presented in unit dosage form and may be prepared by any of the methods well known in the art of pharmacy. Such methods include the step of bringing into association the albumin fusion protein with the carrier that constitutes one or more accessory ingredients. In general the formulations are prepared by uniformly and intimately bringing into association the active ingredient with liquid carriers or finely divided solid carriers or both, and then, if necessary, shaping the product.

[0440] Formulations suitable for parenteral administration include aqueous and non-aqueous sterile injection solutions which may contain anti-oxidants, buffers, bacteriostats and solutes which render the formulation appropriate for the intended recipient; and aqueous and non-aqueous sterile suspensions which may include suspending agents and thickening agents. The formulations may be presented in unit-dose or multi-dose containers, for example sealed ampules, vials or syringes, and may be stored in a freeze-dried (lyophilised) condition requiring only the addition of the sterile liquid carrier, for example water for injections, immediately prior to use. Extemporaneous injection solutions and suspensions may be prepared from sterile powders. Dosage formulations may contain the Therapeutic protein portion at a lower molar concentration or lower dosage compared to the non-fused standard formulation for the Therapeutic protein given the extended serum half-life exhibited by many of the albumin fusion proteins of the invention.

[0441] As an example, when an albumin fusion protein of the invention comprises growth hormone as one or more of the Therapeutic protein regions, the dosage form can be calculated on the basis of the potency of the albumin fusion protein relative to the potency of hGH, while taking into account the prolonged serum half-life and shelf-life of the albumin fusion proteins compared to that of native hGH. Growth hormone is typically administered at 0.3 to 30.0 IU/kg/week, for example 0.9 to 12.0 IU/kg/week, given in three or seven divided doses for a year or more. In an albumin fusion protein consisting of full length HA fused to full length GH, an equivalent dose in terms of units would represent a greater weight of agent but the dosage frequency can be reduced, for example to twice a week, once a week or less.

[0442] Formulations or compositions of the invention may be packaged together with, or included in a kit with, instructions or a package insert referring to the extended shelf-life of the albumin fusion protein component. For instance, such instructions or package inserts may address recommended storage conditions, such as time, temperature and light, taking into account the extended or prolonged shelf-life of the albumin fusion proteins of the invention. Such instructions or package inserts may also address the particular advantages of the albumin fusion proteins of the inventions, such as the ease of storage for formulations that may require use in the field, outside of controlled hospital, clinic or office conditions. As described above, formulations of the invention may be in aqueous form and may be stored under less than ideal circumstances without significant loss of therapeutic activity.

[0443] Albumin fusion proteins of the invention can also be included in nutraceuticals. For instance, certain albumin fusion proteins of the invention may be administered in natural products, including milk or milk product obtained from a transgenic mammal which expresses albumin fusion protein. Such compositions can also include plant or plant products obtained from a transgenic plant which expresses the albumin fusion protein. The albumin fusion protein can also be provided in powder or tablet form, with or without other known additives, carriers, fillers and diluents. Nutraceuticals are described in Scott Hegenhart, Food Product Design, December 1993.

[0444] The invention also provides methods of treatment and/or prevention of diseases or disorders (such as, for example, any one or more of the diseases or disorders disclosed herein) by administration to a subject of an effective amount of an albumin fusion protein of the invention or a polynucleotide encoding an albumin fusion protein of the invention (“albumin fusion polynucleotide”) in a pharmaceutically acceptable carrier.

[0445] The albumin fusion protein and/or polynucleotide will be formulated and dosed in a fashion consistent with good medical practice, taking into account the clinical condition of the individual patient (especially the side effects of treatment with the albumin fusion protein and/or polynucleotide alone), the site of delivery, the method of administration, the scheduling of administration, and other factors known to practitioners. The “effective amount” for purposes herein is thus determined by such considerations.

[0446] As a general proposition, the total pharmaceutically effective amount of the albumin fusion protein administered parenterally per dose will be in the range of about 1 ug/kg/day to 10 mg/kg/day of patient body weight, although, as noted above, this will be subject to therapeutic discretion. More preferably, this dose is at least 0.01 mg/kg/day, and most preferably for humans between about 0.01 and 1 mg/kg/day for the hormone. If given continuously, the albumin fusion protein is typically administered at a dose rate of about 1 ug/kg/hour to about 50 ug/kg/hour, either by 1-4 injections per day or by continuous subcutaneous infusions, for example, using a mini-pump. An intravenous bag solution may also be employed. The length of treatment needed to observe changes and the interval following treatment for responses to occur appears to vary depending on the desired effect.

[0447] Albumin fusion proteins and/or polynucleotides can be are administered orally, rectally, parenterally, intracisternally, intravaginally, intraperitoneally, topically (as by powders, ointments, gels, drops or transdermal patch), bucally, or as an oral or nasal spray. “Pharmaceutically acceptable carrier” refers to a non-toxic solid, semisolid or liquid filler, diluent, encapsulating material or formulation auxiliary of any. The term “parenteral” as used herein refers to modes of administration which include intravenous, intramuscular, intraperitoneal, intrasternal, subcutaneous and intraarticular injection and infusion.

[0448] Albumin fusion proteins and/or polynucleotides of the invention are also suitably administered by sustained-release systems. Examples of sustained-release albumin fusion proteins and/or polynucleotides are administered orally, rectally, parenterally, intracisternally, intravaginally, intraperitoneally, topically (as by powders, ointments, gels, drops or transdermal patch), bucally, or as an oral or nasal spray. “Pharmaceutically acceptable carrier” refers to a non-toxic solid, semisolid or liquid filler, diluent, encapsulating material or formulation auxiliary of any type. The term “parenteral” as used herein refers to modes of administration which include intravenous, intramuscular, intraperitoneal, intrasternal, subcutaneous and intraarticular injection and infusion. Additional examples of sustained-release albumin fusion proteins and/or polynucleotides include suitable polymeric materials (such as, for example, semi-permeable polymer matrices in the form of shaped articles, e.g., films, or mirocapsules), suitable hydrophobic materials (for example as an emulsion in an acceptable oil) or ion exchange resins, and sparingly soluble derivatives (such as, for example, a sparingly soluble salt).

[0449] Sustained-release matrices include polylactides (U.S. Pat. No. 3,773,919, EP 58,481), copolymers of L-glutamic acid and gamma-ethyl-L-glutamate (Sidman et al., Biopolymers 22:547-556 (1983)), poly (2-hydroxyethyl methacrylate) (Langer et al., J. Biomed. Mater. Res. 15:167-277 (1981), and Langer, Chem. Tech. 12:98-105 (1982)), ethylene vinyl acetate (Langer et al., Id.) or poly-D-(−)-3-hydroxybutyric acid (EP 133,988).

[0450] Sustained-release albumin fusion proteins and/or polynucleotides also include liposomally entrapped albumin fusion proteins and/or polynucleotides of the invention (see generally, Langer, Science 249:1527-1533 (1990); Treat et al., in Liposomes in the Therapy of Infectious Disease and Cancer, Lopez-Berestein and Fidler (eds.), Liss, New York, pp. 317-327 and 353-365 (1989)). Liposomes containing the albumin fusion protein and/or polynucleotide are prepared by methods known per se: DE 3,218,121; Epstein et al., Proc. Natl. Acad. Sci. (USA) 82:3688-3692 (1985); Hwang et al., Proc. Natl. Acad. Sci. (USA) 77:4030-4034 (1980); EP 52,322; EP 36,676; EP 88,046; EP 143,949; EP 142,641; Japanese Pat. Appl. 83-118008; U.S. Pat. Nos. 4,485,045 and 4,544,545; and EP 102,324. Ordinarily, the liposomes are of the small (about 200-800 Angstroms) unilamellar type in which the lipid content is greater than about 30 mol. percent cholesterol, the selected proportion being adjusted for the optimal Therapeutic.

[0451] In yet an additional embodiment, the albumin fusion proteins and/or polynucleotides of the invention are delivered by way of a pump (see Langer, supra; Sefton, CRC Crit. Ref. Biomed. Eng. 14:201 (1987); Buchwald et al., Surgery 88:507 (1980); Saudek et al., N. Engl. J. Med. 321:574 (1989)).

[0452] Other controlled release systems are discussed in the review by Langer (Science 249:1527-1533 (1990)).

[0453] For parenteral administration, in one embodiment, the albumin fusion protein and/or polynucleotide is formulated generally by mixing it at the desired degree of purity, in a unit dosage injectable form (solution, suspension, or emulsion), with a pharmaceutically acceptable carrier, i.e., one that is non-toxic to recipients at the dosages and concentrations employed and is compatible with other ingredients of the formulation. For example, the formulation preferably does not include oxidizing agents and other compounds that are known to be deleterious to the Therapeutic.

[0454] Generally, the formulations are prepared by contacting the albumin fusion protein and/or polynucleotide uniformly and intimately with liquid carriers or finely divided solid carriers or both. Then, if necessary, the product is shaped into the desired formulation. Preferably the carrier is a parenteral carrier, more preferably a solution that is isotonic with the blood of the recipient. Examples of such carrier vehicles include water, saline, Ringer's solution, and dextrose solution. Non-aqueous vehicles such as fixed oils and ethyl oleate are also useful herein, as well as liposomes.

[0455] The carrier suitably contains minor amounts of additives such as substances that enhance isotonicity and chemical stability. Such materials are non-toxic to recipients at the dosages and concentrations employed, and include buffers such as phosphate, citrate, succinate, acetic acid, and other organic acids or their salts; antioxidants such as ascorbic acid; low molecular weight (less than about ten residues) polypeptides, e.g., polyarginine or tripeptides; proteins, such as serum albumin, gelatin, or immunoglobulins; hydrophilic polymers such as polyvinylpyrrolidone; amino acids, such as glycine, glutamic acid, aspartic acid, or arginine; monosaccharides, disaccharides, and other carbohydrates including cellulose or its derivatives, glucose, manose, or dextrins; chelating agents such as EDTA; sugar alcohols such as mannitol or sorbitol; counterions such as sodium; and/or nonionic surfactants such as polysorbates, poloxamers, or PEG.

[0456] The albumin fusion protein is typically formulated in such vehicles at a concentration of about 0.1 mg/ml to 100 mg/ml, preferably 1-10 mg/ml, at a pH of about 3 to 8. It will be understood that the use of certain of the foregoing excipients, carriers, or stabilizers will result in the formation of polypeptide salts.

[0457] Any pharmaceutical used for therapeutic administration can be sterile. Sterility is readily accomplished by filtration through sterile filtration membranes (e.g., 0.2 micron membranes). Albumin fusion proteins and/or polynucleotides generally are placed into a container having a sterile access port, for example, an intravenous solution bag or vial having a stopper pierceable by a hypodermic injection needle.

[0458] Albumin fusion proteins and/or polynucleotides ordinarily will be stored in unit or multi-dose containers, for example, sealed ampoules or vials, as an aqueous solution or as a lyophilized formulation for reconstitution. As an example of a lyophilized formulation, 10-ml vials are filled with 5 ml of sterile-filtered 1% (w/v) aqueous albumin fusion protein and/or polynucleotide solution, and the resulting mixture is lyophilized. The infusion solution is prepared by reconstituting the lyophilized albumin fusion protein and/or polynucleotide using bacteriostatic Water-for-Injection.

[0459] In a specific and preferred embodiment, the Albumin fusion protein formulations comprises 0.01 M sodium phosphate, 0.15 mM sodium chloride, 0.16 micromole sodium octanoate/milligram of fusion protein, 15 micrograms/milliliter polysorbate 80, pH 7.2. In another specific and preferred embodiment, the Albumin fusion protein formulations consists 0.01 M sodium phosphate, 0.15 mM sodium chloride, 0.16 micromole sodium octanoate/milligram of fusion protein, 15 micrograms/milliliter polysorbate 80, pH 7.2. The pH and buffer are chosen to match physiological conditions and the salt is added as a tonicifier. Sodium octanoate has been chosen due to its reported ability to increase the thermal stability of the protein in solution. Finally, polysorbate has been added as a generic surfactant, which lowers the surface tension of the solution and lowers non-specific adsorption of the albumin fusion protein to the container closure system.

[0460] The invention also provides a pharmaceutical pack or kit comprising one or more containers filled with one or more of the ingredients of the albumin fusion proteins and/or polynucleotides of the invention. Associated with such container(s) can be a notice in the form prescribed by a governmental agency regulating the manufacture, use or sale of pharmaceuticals or biological products, which notice reflects approval by the agency of manufacture, use or sale for human administration. In addition, the albumin fusion proteins and/or polynucleotides may be employed in conjunction with other therapeutic compounds.

[0461] The albumin fusion proteins and/or polynucleotides of the invention may be administered alone or in combination with adjuvants. Adjuvants that may be administered with the albumin fusion proteins and/or polynucleotides of the invention include, but are not limited to, alum, alum plus deoxycholate (ImmunoAg), MTP-PE (Biocine Corp.), QS21 (Genentech, Inc.), BCG (e.g., THERACYS®), MPL and nonviable preparations of Corynebacterium parvum. In a specific embodiment, albumin fusion proteins and/or polynucleotides of the invention are administered in combination with alum. In another specific embodiment, albumin fusion proteins and/or polynucleotides of the invention are administered in combination with QS-21. Further adjuvants that may be administered with the albumin fusion proteins and/or polynucleotides of the invention include, but are not limited to, Monophosphoryl lipid immunomodulator, AdjuVax 100a, QS-21, QS-18, CRL1005, Aluminum salts, MF-59, and Virosomal adjuvant technology. Vaccines that may be administered with the albumin fusion proteins and/or polynucleotides of the invention include, but are not limited to, vaccines directed toward protection against MMR (measles, mumps, rubella), polio, varicella, tetanus/diptheria, hepatitis A, hepatitis B, Haemophilus influenzae B, whooping cough, pneumonia, influenza, Lyme's Disease, rotavirus, cholera, yellow fever, Japanese encephalitis, poliomyelitis, rabies, typhoid fever, and pertussis. Combinations may be administered either concomitantly, e.g., as an admixture, separately but simultaneously or concurrently; or sequentially. This includes presentations in which the combined agents are administered together as a therapeutic mixture, and also procedures in which the combined agents are administered separately but simultaneously, e.g., as through separate intravenous lines into the same individual. Administration “in combination” further includes the separate administration of one of the compounds or agents given first, followed by the second.

[0462] The albumin fusion proteins and/or polynucleotides of the invention may be administered alone or in combination with other therapeutic agents. Albumin fusion protein and/or polynucleotide agents that may be administered in combination with the albumin fusion proteins and/or polynucleotides of the invention, include but not limited to, chemotherapeutic agents, antibiotics, steroidal and non-steroidal anti-inflammatories, conventional immunotherapeutic agents, and/or therapeutic treatments described below. Combinations may be administered either concomitantly, e.g., as an admixture, separately but simultaneously or concurrently; or sequentially. This includes presentations in which the combined agents are administered together as a therapeutic mixture, and also procedures in which the combined agents are administered separately but simultaneously, e.g., as through separate intravenous lines into the same individual. Administration “in combination” further includes the separate administration of one of the compounds or agents given first, followed by the second.

[0463] In one embodiment, the albumin fusion proteins and/or polynucleotides of the invention are administered in combination with an anticoagulant. Anticoagulants that may be administered with the compositions of the invention include, but are not limited to, heparin, low molecular weight heparin, warfarin sodium (e.g., COUMADIN®), dicumarol, 4-hydroxycoumarin, anisindione (e.g., MIRADON™), acenocoumarol (e.g., nicoumalone, SINTHROME™), indan-1,3-dione, phenprocoumon (e.g., MARCUMAR™), ethyl biscoumacetate (e.g., TROMEXAN™), and aspirin. In a specific embodiment, compositions of the invention are administered in combination with heparin and/or warfarin. In another specific embodiment, compositions of the invention are administered in combination with warfarin. In another specific embodiment, compositions of the invention are administered in combination with warfarin and aspirin. In another specific embodiment, compositions of the invention are administered in combination with heparin. In another specific embodiment, compositions of the invention are administered in combination with heparin and aspirin.

[0464] In another embodiment, the albumin fusion proteins and/or polynucleotides of the invention are administered in combination with thrombolytic drugs. Thrombolytic drugs that may be administered with the compositions of the invention include, but are not limited to, plasminogen, lys-plasminogen, alpha2-antiplasmin, streptokinae (e.g., KABIKINASE™), antiresplace (e.g., EMINASE™), tissue plasminogen activator (t-PA, altevase, ACTIVASE™), urokinase (e.g., ABBOKINASE™), sauruplase, (Prourokinase, single chain urokinase), and aminocaproic acid (e.g., AMICAR™). In a specific embodiment, compositions of the invention are administered in combination with tissue plasminogen activator and aspirin.

[0465] In another embodiment, the albumin fusion proteins and/or polynucleotides of the invention are administered in combination with antiplatelet drugs. Antiplatelet drugs that may be administered with the compositions of the invention include, but are not limited to, aspirin, dipyridamole (e.g., PERSANTINE™), and ticlopidine (e.g., TICLID™).

[0466] In specific embodiments, the use of anti-coagulants, thrombolytic and/or antiplatelet drugs in combination with albumin fusion proteins and/or polynucleotides of the invention is contemplated for the prevention, diagnosis, and/or treatment of thrombosis, arterial thrombosis, venous thrombosis, thromboembolism, pulmonary embolism, atherosclerosis, myocardial infarction, transient ischemic attack, unstable angina. In specific embodiments, the use of anticoagulants, thrombolytic drugs and/or antiplatelet drugs in combination with albumin fusion proteins and/or polynucleotides of the invention is contemplated for the prevention of occulsion of saphenous grafts, for reducing the risk of periprocedural thrombosis as might accompany angioplasty procedures, for reducing the risk of stroke in patients with atrial fibrillation including nonrheumatic atrial fibrillation, for reducing the risk of embolism associated with mechanical heart valves and or mitral valves disease. Other uses for the therapeutics of the invention, alone or in combination with antiplatelet, anticoagulant, and/or thrombolytic drugs, include, but are not limited to, the prevention of occlusions in extracorporeal devices (e.g., intravascular canulas, vascular access shunts in hemodialysis patients, hemodialysis machines, and cardiopulmonary bypass machines).

[0467] In certain embodiments, albumin fusion proteins and/or polynucleotides of the invention are administered in combination with antiretroviral agents, nucleoside/nucleotide reverse transcriptase inhibitors (NRTIs), non-nucleoside reverse transcriptase inhibitors (NNRTIs), and/or protease inhibitors (PIs). NRTIs that may be administered in combination with the albumin fusion proteins and/or polynucleotides of the invention, include, but are not limited to, RETROVIR™ (zidovudine/AZT), VIDEX™ (didanosine/ddI), HIVID™ (zalcitabine/ddC), ZERIT™ (stavudine/d4T), EPIVIR™ (lamivudine/3TC), and COMBIVIR™ (zidovudine/lamivudine). NNRTIs that may be administered in combination with the albumin fusion proteins and/or polynucleotides of the invention, include, but are not limited to, VIRAMUNE™ (nevirapine), RESCRIPTOR™ (delavirdine), and SUSTIVA™ (efavirenz). Protease inhibitors that may be administered in combination with the albumin fusion proteins and/or polynucleotides of the invention, include, but are not limited to, CRIXIVAN™ (indinavir), NORVIR™ (ritonavir), INVIRASE™ (saquinavir), and VIRACEPT™ (nelfinavir). In a specific embodiment, antiretroviral agents, nucleoside reverse transcriptase inhibitors, non-nucleoside reverse transcriptase inhibitors, and/or protease inhibitors may be used in any combination with albumin fusion proteins and/or polynucleotides of the invention to treat AIDS and/or to prevent or treat HIV infection.

[0468] Additional NRTIs include LODENOSINE™ (F-ddA; an acid-stable adenosine NRTI; Triangle/Abbott; COVIRACIL™ (emtricitabine/FTC; structurally related to lamivudine (3TC) but with 3- to 10-fold greater activity in vitro; Triangle/Abbott); dOTC (BCH-10652, also structurally related to lamivudine but retains activity against a substantial proportion of lamivudine-resistant isolates; Biochem Pharma); Adefovir (refused approval for anti-HIV therapy by FDA; Gilead Sciences); PREVEON® (Adefovir Dipivoxil, the active prodrug of adefovir; its active form is PMEA-pp); TENOFOVIR™ (bis-POC PMPA, a PMPA prodrug; Gilead); DAPD/DXG (active metabolite of DAPD; Triangle/Abbott); D-D4FC (related to 3TC, with activity against AZT/3TC-resistant virus); GW420867X (Glaxo Wellcome); ZIAGEN™ (abacavir/159U89; Glaxo Wellcome Inc.); CS-87 (3′ azido-2′,3′-dideoxyuridine; WO 99/66936); and S-acyl-2-thioethyl (SATE)-bearing prodrug forms of β-L-FD4C and β-L-FddC (WO 98/17281).

[0469] Additional NNRTIs include COACTINON™ (Emivirine/MKC-442, potent NNRTI of the HEPT class; Triangle/Abbott); CAPRAVIRINE™ (AG-1549/S-1153, a next generation NNRTI with activity against viruses containing the K103N mutation; Agouron); PNU-142721 (has 20- to 50-fold greater activity than its predecessor delavirdine and is active against K103N mutants; Pharmacia & Upjohn); DPC-961 and DPC-963 (second-generation derivatives of efavirenz, designed to be active against viruses with the K103N mutation; DuPont); GW-420867X (has 25-fold greater activity than HBY097 and is active against K103N mutants; Glaxo Wellcome); CALANOLIDE A (naturally occurring agent from the latex tree; active against viruses containing either or both the Y181C and K₁₀₃N mutations); and Propolis (WO 99/49830).

[0470] Additional protease inhibitors include LOPINAVIR™ (ABT378/r; Abbott Laboratories); BMS-232632 (an azapeptide; Bristol-Myres Squibb); TIPRANAVIR™ (PNU-140690, a non-peptic dihydropyrone; Pharmacia & Upjohn); PD-178390 (a nonpeptidic dihydropyrone; Parke-Davis); BMS 232632 (an azapeptide; Bristol-Myers Squibb); L-756,423 (an indinavir analog; Merck); DMP-450 (a cyclic urea compound; Avid & DuPont); AG-1776 (a peptidomimetic with in vitro activity against protease inhibitor-resistant viruses; Agouron); VX-175/GW-433908 (phosphate prodrug of amprenavir; Vertex & Glaxo Welcome); CGP61755 (Ciba); and AGENERASE™ (amprenavir; Glaxo Wellcome Inc.).

[0471] Additional antiretroviral agents include fusion inhibitors/gp41 binders. Fusion inhibitors/gp41 binders include T-20 (a peptide from residues 643-678 of the HIV gp41 transmembrane protein ectodomain which binds to gp41 in its resting state and prevents transformation to the fusogenic state; Trimeris) and T-1249 (a second-generation fusion inhibitor; Trimeris).

[0472] Additional antiretroviral agents include fusion inhibitors/chemokine receptor antagonists. Fusion inhibitors/chemokine receptor antagonists include CXCR4 antagonists such as AMD 3100 (a bicyclam), SDF-1 and its analogs, and ALX40-4C (a cationic peptide), T22 (an 18 amino acid peptide; Trimeris) and the T22 analogs T134 and T140; CCR5 antagonists such as RANTES (9-68), AOP-RANTES, NNY-RANTES, and TAK-779; and CCR5/CXCR4 antagonists such as NSC 651016 (a distamycin analog). Also included are CCR2B, CCR3, and CCR6 antagonists. Chemokine receptor agonists such as RANTES, SDF-1, MIP-1α, MIP-1β, etc., may also inhibit fusion.

[0473] Additional antiretroviral agents include integrase inhibitors. Integrase inhibitors include dicaffeoylquinic (DFQA) acids; L-chicoric acid (a dicaffeoyltartaric (DCTA) acid); quinalizarin (QLC) and related anthraquinones; ZINTEVIR™ (AR 177, an oligonucleotide that probably acts at cell surface rather than being a true integrase inhibitor; Arondex); and naphthols such as those disclosed in WO 98/50347.

[0474] Additional antiretroviral agents include hydroxyurea-like compounds such as BCX-34 (a purine nucleoside phosphorylase inhibitor; Biocryst); ribonucleotide reductase inhibitors such as DIDOX™ (Molecules for Health); inosine monophosphate dehydrogenase (IMPDH) inhibitors sucha as VX-497 (Vertex); and mycopholic acids such as CellCept (mycophenolate mofetil; Roche).

[0475] Additional antiretroviral agents include inhibitors of viral integrase, inhibitors of viral genome nuclear translocation such as arylene bis(methylketone) compounds; inhibitors of HIV entry such as AOP-RANTES, NNY-RANTES, RANTES-IgG fusion protein, soluble complexes of RANTES and glycosaminoglycans (GAG), and AMD-3100; nucleocapsid zinc finger inhibitors such as dithiane compounds; targets of HIV Tat and Rev; and pharmacoenhancers such as ABT-378.

[0476] Other antiretroviral therapies and adjunct therapies include cytokines and lymphokines such as MIP-1α, SDF-1α, IL-2, PROLEUKIN™ (aldesleukin/L2-7001; Chiron), IL-4, IL-10, IL-12, and IL-13; interferons such as IFN-α2a; antagonists of TNFs, NFκB, GM-CSF, M-CSF, and IL-10; agents that modulate immune activation such as cyclosporin and prednisone; vaccines such as Remune™ (HIV Immunogen), APL 400-003 (Apollon), recombinant gp120 and fragments, bivalent (B/E) recombinant envelope glycoprotein, rgp120CM235, MN rgp120, SF-2 rgp120, gp120/soluble CD4 complex, Delta JR-FL protein, branched synthetic peptide derived from discontinuous gp120 C3/C4 domain, fusion-competent immunogens, and Gag, Pol, Nef, and Tat vaccines; gene-based therapies such as genetic suppressor elements (GSEs; WO 98/54366), and intrakines (genetically modified CC chemokines targetted to the ER to block surface expression of newly synthesized CCR5 (Yang et al., PNAS 94:11567-72 (1997); Chen et al., Nat. Med. 3:1110-16 (1997)); antibodies such as the anti-CXCR4 antibody 12G5, the anti-CCR5 antibodies 2D7, 5C7, PA8, PA9, PA10, PA11, PA12, and PA14, the anti-CD4 antibodies Q4120 and RPA-T4, the anti-CCR3 antibody 7B11, the anti-gp120 antibodies 17b, 48d, 447-52D, 257-D, 268-D and 50.1, anti-Tat antibodies, anti-TNF-α antibodies, and monoclonal antibody 33A; aryl hydrocarbon (AH) receptor agonists and antagonists such as TCDD, 3,3′,4,4′,5-pentachlorobiphenyl, 3,3′,4,4′-tetrachlorobiphenyl, and α-naphthoflavone (WO 98/30213); and antioxidants such as γ-L-glutamyl-L-cysteine ethyl ester (γ-GCE; WO 99/56764).

[0477] In a further embodiment, the albumin fusion proteins and/or polynucleotides of the invention are administered in combination with an antiviral agent. Antiviral agents that may be administered with the albumin fusion proteins and/or polynucleotides of the invention include, but are not limited to, acyclovir, ribavirin, amantadine, and remantidine.

[0478] In other embodiments, albumin fusion proteins and/or polynucleotides of the invention may be administered in combination with anti-opportunistic infection agents. Anti-opportunistic agents that may be administered in combination with the albumin fusion proteins and/or polynucleotides of the invention, include, but are not limited to, TRIMETHOPRIM-SULFAMETHOXAZOLE™, DAPSONE™, PENTAMIDINE™, ATOVAQUONE™, ISONIAZID™, RIFAMPIN™, PYRAZINAMIDE™, ETHAMBUTOL™, RIFABUTIN™, CLARITHROMYCIN™, AZITHROMYCIN™, GANCICLOVIR™, FOSCARNET™, CIDOFOVIR™, FLUCONAZOLE™, ITRACONAZOLE™, KETOCONAZOLE™, ACYCLOVIR™, FAMCICOLVIR™, PYRIMETHAMINE™, LEUCOVORIN™, NEUPOGEN™ (filgrastim/G-CSF), and LEUKINE™ (sargramostim/GM-CSF). In a specific embodiment, albumin fusion proteins and/or polynucleotides of the invention are used in any combination with TRIMETHOPRIM-SULFAMETHOXAZOLE™, DAPSONE™, PENTAMIDINE™, and/or ATOVAQUONE™ to prophylactically treat or prevent an opportunistic Pneumocystis carinii pneumonia infection. In another specific embodiment, albumin fusion proteins and/or polynucleotides of the invention are used in any combination with ISONIAZID™, RIFAMPIN™, PYRAZINAMIDE™, and/or ETHAMBUTOL™ to prophylactically treat or prevent an opportunistic Mycobacterium avium complex infection. In another specific embodiment, albumin fusion proteins and/or polynucleotides of the invention are used in any combination with RIFABUTIN™, CLARITHROMYCIN™, and/or AZITHROMYCIN™ to prophylactically treat or prevent an opportunistic Mycobacterium tuberculosis infection. In another specific embodiment, albumin fusion proteins and/or polynucleotides of the invention are used in any combination with GANCICLOVIR™, FOSCARNET™, and/or CIDOFOVIR™ to prophylactically treat or prevent an opportunistic cytomegalovirus infection. In another specific embodiment, albumin fusion proteins and/or polynucleotides of the invention are used in any combination with FLUCONAZOLE™, ITRACONAZOLE™, and/or KETOCONAZOLE™ to prophylactically treat or prevent an opportunistic fungal infection. In another specific embodiment, albumin fusion proteins and/or polynucleotides of the invention are used in any combination with ACYCLOVIR™ and/or FAMCICOLVIR™ to prophylactically treat or prevent an opportunistic herpes simplex virus type I and/or type II infection. In another specific embodiment, albumin fusion proteins and/or polynucleotides of the invention are used in any combination with PYRIMETHAMINE™ and/or LEUCOVORIN™ to prophylactically treat or prevent an opportunistic Toxoplasma gondii infection. In another specific embodiment, albumin fusion proteins and/or polynucleotides of the invention are used in any combination with LEUCOVORIN™ and/or NEUPOGEN™ to prophylactically treat or prevent an opportunistic bacterial infection.

[0479] In a further embodiment, the albumin fusion proteins and/or polynucleotides of the invention are administered in combination with an antibiotic agent. Antibiotic agents that may be administered with the albumin fusion proteins and/or polynucleotides of the invention include, but are not limited to, amoxicillin, beta-lactamases, aminoglycosides, beta-lactam (glycopeptide), beta-lactamases, Clindamycin, chloramphenicol, cephalosporins, ciprofloxacin, erythromycin, fluoroquinolones, macrolides, metronidazole, penicillins, quinolones, rapamycin, rifampin, streptomycin, sulfonamide, tetracyclines, trimethoprim, trimethoprim-sulfamethoxazole, and vancomycin.

[0480] In other embodiments, the albumin fusion proteins and/or polynucleotides of the invention are administered in combination with immunestimulants. Immunostimulants that may be administered in combination with the albumin fusion proteins and/or polynucleotides of the invention include, but are not limited to, levamisole (e.g., ERGAMISOL™), isoprinosine (e.g. INOSIPLEX™), interferons (e.g. interferon alpha), and interleukins (e.g., IL-2).

[0481] In other embodiments, albumin fusion proteins and/or polynucleotides of the invention are administered in combination with immunosuppressive agents. Immunosuppressive agents that may be administered in combination with the albumin fusion proteins and/or polynucleotides of the invention include, but are not limited to, steroids, cyclosporine, cyclosporine analogs, cyclophosphamide methylprednisone, prednisone, azathioprine, FK-506, 15-deoxyspergualin, and other immunosuppressive agents that act by suppressing the function of responding T cells. Other immunosuppressive agents that may be administered in combination with the albumin fusion proteins and/or polynucleotides of the invention include, but are not limited to, prednisolone, methotrexate, thalidomide, methoxsalen, rapamycin, leflunomide, mizoribine (BREDININ™), brequinar, deoxyspergualin, and azaspirane (SKF 105685), ORTHOCLONE OKT® 3 (muromonab-CD3), SANDIMMUNE™, NEORAL™, SANGDYA™ (cyclosporine), PROGRAF® (FK506, tacrolimus), CELLCEPT® (mycophenolate motefil, of which the active metabolite is mycophenolic acid), IMURAN™ (azathioprine), glucocorticosteroids, adrenocortical steroids such as DELTASONE™ (prednisone) and HYDELTRASOL™ (prednisolone), FOLEX™ and MEXATE™ (methotrxate), OXSORALEN-ULTRA™ (methoxsalen) and RAPAMUNE™ (sirolimus). In a specific embodiment, immunosuppressants may be used to prevent rejection of organ or bone marrow transplantation.

[0482] In an additional embodiment, albumin fusion proteins and/or polynucleotides of the invention are administered alone or in combination with one or more intravenous immune globulin preparations. Intravenous immune globulin preparations that may be administered with the albumin fusion proteins and/or polynucleotides of the invention include, but not limited to, GAMMAR™, IVEEGAM™, SANDOGLOBULIN™, GAMMAGARD S/D™, ATGAM™ (antithymocyte glubulin), and GAMIMUNE™. In a specific embodiment, albumin fusion proteins and/or polynucleotides of the invention are administered in combination with intravenous immune globulin preparations in transplantation therapy (e.g., bone marrow transplant).

[0483] In certain embodiments, the albumin fusion proteins and/or polynucleotides of the invention are administered alone or in combination with an anti-inflammatory agent. Anti-inflammatory agents that may be administered with the albumin fusion proteins and/or polynucleotides of the invention include, but are not limited to, corticosteroids (e.g. betamethasone, budesonide, cortisone, dexamethasone, hydrocortisone, methylprednisolone, prednisolone, prednisone, and triamcinolone), nonsteroidal anti-inflammatory drugs (e.g., diclofenac, diflunisal, etodolac, fenoprofen, floctafenine, flurbiprofen, ibuprofen, indomethacin, ketoprofen, meclofenamate, mefenamic acid, meloxicam, nabumetone, naproxen, oxaprozin, phenylbutazone, piroxicam, sulindac, tenoxicam, tiaprofenic acid, and tolmetin), as well as antihistamines, aminoarylcarboxylic acid derivatives, arylacetic acid derivatives, arylbutyric acid derivatives, arylcarboxylic acids, arylpropionic acid derivatives, pyrazoles, pyrazolones, salicylic acid derivatives, thiazinecarboxamides, e-acetamidocaproic acid, S-adenosylmethionine, 3-amino-4-hydroxybutyric acid, amixetrine, bendazac, benzydamine, bucolome, difenpiramide, ditazol, emorfazone, guaiazulene, nabumetone, nimesulide, orgotein, oxaceprol, paranyline, perisoxal, pifoxime, proquazone, proxazole, and tenidap.

[0484] In an additional embodiment, the compositions of the invention are administered alone or in combination with an anti-angiogenic agent. Anti-angiogenic agents that may be administered with the compositions of the invention include, but are not limited to, Angiostatin (Entremed, Rockville, Md.), Troponin-1 (Boston Life Sciences, Boston, Mass.), anti-Invasive Factor, retinoic acid and derivatives thereof, paclitaxel (Taxol), Suramin, Tissue Inhibitor of Metalloproteinase-1, Tissue Inhibitor of Metalloproteinase-2, VEGI, Plasminogen Activator Inhibitor-1, Plasminogen Activator Inhibitor-2, and various forms of the lighter “d group” transition metals.

[0485] Lighter “d group” transition metals include, for example, vanadium, molybdenum, tungsten, titanium, niobium, and tantalum species. Such transition metal species may form transition metal complexes. Suitable complexes of the above-mentioned transition metal species include oxo transition metal complexes.

[0486] Representative examples of vanadium complexes include oxo vanadium complexes such as vanadate and vanadyl complexes. Suitable vanadate complexes include metavanadate and orthovanadate complexes such as, for example, ammonium metavanadate, sodium metavanadate, and sodium orthovanadate. Suitable vanadyl complexes include, for example, vanadyl acetylacetonate and vanadyl sulfate including vanadyl sulfate hydrates such as vanadyl sulfate mono- and trihydrates.

[0487] Representative examples of tungsten and molybdenum complexes also include oxo complexes. Suitable oxo tungsten complexes include tungstate and tungsten oxide complexes. Suitable tungstate complexes include ammonium tungstate, calcium tungstate, sodium tungstate dihydrate, and tungstic acid. Suitable tungsten oxides include tungsten (IV) oxide and tungsten (VI) oxide. Suitable oxo molybdenum complexes include molybdate, molybdenum oxide, and molybdenyl complexes. Suitable molybdate complexes include ammonium molybdate and its hydrates, sodium molybdate and its hydrates, and potassium molybdate and its hydrates. Suitable molybdenum oxides include molybdenum (VI) oxide, molybdenum (VI) oxide, and molybdic acid. Suitable molybdenyl complexes include, for example, molybdenyl acetylacetonate. Other suitable tungsten and molybdenum complexes include hydroxo derivatives derived from, for example, glycerol, tartaric acid, and sugars.

[0488] A wide variety of other anti-angiogenic factors may also be utilized within the context of the present invention. Representative examples include, but are not limited to, platelet factor 4; protamine sulphate; sulphated chitin derivatives (prepared from queen crab shells), (Murata et al., Cancer Res. 51:22-26, (1991)); Sulphated Polysaccharide Peptidoglycan Complex (SP-PG) (the function of this compound may be enhanced by the presence of steroids such as estrogen, and tamoxifen citrate); Staurosporine; modulators of matrix metabolism, including for example, proline analogs, cishydroxyproline, d,L-3,4-dehydroproline, Thiaproline, alpha,alpha-dipyridyl, aminopropionitrile fumarate; 4-propyl-5-(4-pyridinyl)-2(3H)-oxazolone; Methotrexate; Mitoxantrone; Heparin; Interferons; 2 Macroglobulin-serum; ChIMP-3 (Pavloff et al., J. Bio. Chem. 267:17321-17326, (1992)); Chymostatin (Tomkinson et al., Biochem J. 286:475-480, (1992)); Cyclodextrin Tetradecasulfate; Eponemycin; Camptothecin; Fumagillin (Ingber et al., Nature 348:555-557, (1990)); Gold Sodium Thiomalate (“GST”; Matsubara and Ziff, J. Clin. Invest. 79:1440-1446, (1987)); anticollagenase-serum; alpha2-antiplasmin (Holmes et al., J. Biol. Chem. 262(4):1659-1664, (1987)); Bisantrene (National Cancer Institute); Lobenzarit disodium (N-(2)-carboxyphenyl-4-chloroanthronilic acid disodium or “CCA”; (Takeuchi et al., Agents Actions 36:312-316, (1992)); and metalloproteinase inhibitors such as BB94.

[0489] Additional anti-angiogenic factors that may also be utilized within the context of the present invention include Thalidomide, (Celgene, Warren, N.J.); Angiostatic steroid; AGM-1470 (H. Brem and J. Folkman J Pediatr. Surg. 28:445-51 (1993)); an integrin alpha v beta 3 antagonist (C. Storgard et al., J Clin. Invest. 103:47-54 (1999)); carboxynaminolmidazole; Carboxyamidotriazole (CAI) (National Cancer Institute, Bethesda, Md.); Conbretastatin A-4 (CA4P) (OXiGENE, Boston, Mass.); Squalamine (Magainin Pharmaceuticals, Plymouth Meeting, Pa.); TNP-470, (Tap Pharmaceuticals, Deerfield, Ill.); ZD-0101 AstraZeneca (London, UK); APRA (CT2584); Benefin, Byrostatin-1 (SC339555); CGP-41251 (PKC 412); CM101; Dexrazoxane (ICRF187); DMXAA; Endostatin; Flavopridiol; Genestein; GTE; ImmTher; Iressa (ZD1839); Octreotide (Somatostatin); Panretin; Penacillamine; Photopoint;

[0490] P1-88; Prinomastat (AG-3340) Purlytin; Suradista (FCE26644); Tamoxifen (Nolvadex); Tazarotene; Tetrathiomolybdate; Xeloda (Capecitabine); and 5-Fluorouracil.

[0491] Anti-angiogenic agents that may be administed in combination with the compounds of the invention may work through a variety of mechanisms including, but not limited to, inhibiting proteolysis of the extracellular matrix, blocking the function of endothelial cell-extracellular matrix adhesion molecules, by antagonizing the function of angiogenesis inducers such as growth factors, and inhibiting integrin receptors expressed on proliferating endothelial cells. Examples of anti-angiogenic inhibitors that interfere with extracellular matrix proteolysis and which may be administered in combination with the compositons of the invention include, but are not Invited to, AG-3340 (Agouron, La Jolla, Calif.), BAY-12-9566 (Bayer, West Haven, Conn.), BMS-275291 (Bristol Myers Squibb, Princeton, N.J.), CGS-27032A (Novartis, East Hanover, N.J.), Marimastat (British Biotech, Oxford, UK), and Metastat (Aeterna, St-Foy, Quebec). Examples of anti-angiogenic inhibitors that act by blocking the function of endothelial cell-extracellular matrix adhesion molecules and which may be administered in combination with the compositons of the invention include, but are not lmited to, EMD-121974 (Merck KcgaA Darmstadt, Germany) and Vitaxin (Ixsys, La Jolla, Calif./Medimmune, Gaithersburg, Me.)). Examples of anti-angiogenic agents that act by directly antagonizing or inhibiting angiogenesis inducers and which may be administered in combination with the compositons of the invention include, but are not lmited to, Angiozyme (Ribozyme, Boulder, Colo.), Anti-VEGF antibody (Genentech, S. San Francisco, Calif.), PTK-787/ZK-225846 (Novartis, Basel, Switzerland), SU-101 (Sugen, S. San Francisco, Calif.), SU-5416 (Sugen/Pharmacia Upjohn, Bridgewater, N.J.), and SU-6668 (Sugen). Other anti-angiogenic agents act to indirectly inhibit angiogenesis. Examples of indirect inhibitors of angiogenesis which may be administered in combination with the compositons of the invention include, but are not limited to, IM-862 (Cytran, Kirkland, Wash.), Interferon-alpha, IL-12 (Roche, Nutley, N.J.), and Pentosan polysulfate (Georgetown University, Washington, D.C.).

[0492] In particular embodiments, the use of compositions of the invention in combination with anti-angiogenic agents is contemplated for the treatment, prevention, and/or amelioration of an autoimmune disease, such as for example, an autoimmune disease described herein.

[0493] In a particular embodiment, the use of compositions of the invention in combination with anti-angiogenic agents is contemplated for the treatment, prevention, and/or amelioration of arthritis. In a more particular embodiment, the use of compositions of the invention in combination with anti-angiogenic agents is contemplated for the treatment, prevention, and/or amelioration of rheumatoid arthritis.

[0494] In another embodiment, the polynucleotides encoding a polypeptide of the present invention are administered in combination with an angiogenic protein, or polynucleotides encoding an angiogenic protein. Examples of angiogenic proteins that may be administered with the compositions of the invention include, but are not limited to, acidic and basic fibroblast growth factors, VEGF-1, VEGF-2, VEGF-3, epidermal growth factor alpha and beta, platelet-derived endothelial cell growth factor, platelet-derived growth factor, tumor necrosis factor alpha, hepatocyte growth factor, insulin-like growth factor, colony stimulating factor, macrophage colony stimulating factor, granulocyte/macrophage colony stimulating factor, and nitric oxide synthase.

[0495] In additional embodiments, compositions of the invention are administered in combination with a chemotherapeutic agent. Chemotherapeutic agents that may be administered with the albumin fusion proteins and/or polynucleotides of the invention include, but are not limited to alkylating agents such as nitrogen mustards (for example, Mechlorethamine, cyclophosphamide, Cyclophosphamide Ifosfamide, Melphalan (L-sarcolysin), and Chlorambucil), ethylenimines and methylmelamines (for example, Hexamethylmelamine and Thiotepa), alkyl sulfonates (for example, Busulfan), nitrosoureas (for example, Carmustine (BCNU), Lomustine (CCNU), Semustine (methyl-CCNU), and Streptozocin (streptozotocin)), triazenes (for example, Dacarbazine (DTIC; dimethyltriazenoimidazolecarboxamide)), folic acid analogs (for example, Methotrexate (amethopterin)), pyrimidine analogs (for example, Fluorouacil (5-fluorouracil; 5-FU), Floxuridine (fluorodeoxyuridine; FudR), and Cytarabine (cytosine arabinoside)), purine analogs and related inhibitors (for example, Mercaptopurine (6-mercaptopurine; 6-MP), Thioguanine (6-thioguanine; TG), and Pentostatin (2′-deoxycoformycin)), vine a alkaloids (for example, Vinblastine (VLB, vinblastine sulfate)) and Vincristine (vincristine sulfate)), epipodophyllotoxins (for example, Etoposide and Teniposide), antibiotics (for example, Dactinomycin (actinomycin D), Daunorubicin (daunomycin; rubidomycin), Doxorubicin, Bleomycin, Plicamycin (mithramycin), and Mitomycin (mitomycin C), enzymes (for example, L-Asparaginase), biological response modifiers (for example, Interferon-alpha and interferon-alpha-2b), platinum coordination compounds (for example, Cisplatin (cis-DDP) and Carboplatin), anthracenedione (Mitoxantrone), substituted ureas (for example, Hydroxyurea), methylhydrazine derivatives (for example, Procarbazine (N-methylhydrazine; MIH), adrenocorticosteroids (for example, Prednisone), progestins (for example, Hydroxyprogesterone caproate, Medroxyprogesterone, Medroxyprogesterone acetate, and Megestrol acetate), estrogens (for example, Diethylstilbestrol (DES), Diethylstilbestrol diphosphate, Estradiol, and Ethinyl estradiol), antiestrogens (for example, Tamoxifen), androgens (Testosterone proprionate, and Fluoxymesterone), anti androgens (for example, Flutamide), gonadotropin-releasing horomone analogs (for example, Leuprolide), other hormones and hormone analogs (for example, methyltestosterone, estramustine, estramustine phosphate sodium, chlorotrianisene, and testolactone), and others (for example, dicarbazine, glutamic acid, and mitotane).

[0496] In one embodiment, the compositions of the invention are administered in combination with one or more of the following drugs: infliximab (also known as Remicade™ Centocor, Inc.), Trocade (Roche, RO-32-3555), Leflunomide (also known as Arava™ from Hoechst Marion Roussel), Kineret™ (an IL-1 Receptor antagonist also known as Anakinra from Amgen, Inc.)

[0497] In a specific embodiment, compositions of the invention are administered in combination with CHOP (cyclophosphamide, doxorubicin, vincristine, and prednisone) or combination of one or more of the components of CHOP. In one embodiment, the compositions of the invention are administered in combination with anti-CD20 antibodies, human monoclonal anti-CD20 antibodies. In another embodiment, the compositions of the invention are administered in combination with anti-CD20 antibodies and CHOP, or anti-CD20 antibodies and any combination of one or more of the components of CHOP, particularly cyclophosphamide and/or prednisone. In a specific embodiment, compositions of the invention are administered in combination with Rituximab. In a further embodiment, compositions of the invention are administered with Rituximab and CHOP, or Rituximab and any combination of one or more of the components of CHOP, particularly cyclophosphamide and/or prednisone. In a specific embodiment, compositions of the invention are administered in combination with tositumomab. In a further embodiment, compositions of the invention are administered with tositumomab and CHOP, or tositumomab and any combination of one or more of the components of CHOP, particularly cyclophosphamide and/or prednisone. The anti-CD20 antibodies may optionally be associated with radioisotopes, toxins or cytotoxic prodrugs.

[0498] In another specific embodiment, the compositions of the invention are administered in combination Zevalin™. In a further embodiment, compositions of the invention are administered with Zevalin™ and CHOP, or Zevalin™ and any combination of one or more of the components of CHOP, particularly cyclophosphamide and/or prednisone. Zevalin™ may be associated with one or more radisotopes. Particularly preferred isotopes are ⁹⁰Y and ¹¹¹In.

[0499] In an additional embodiment, the albumin fusion proteins and/or polynucleotides of the invention are administered in combination with cytokines. Cytokines that may be administered with the albumin fusion proteins and/or polynucleotides of the invention include, but are not limited to, IL2, IL3, IL4, IL5, IL6, IL7, IL10, IL12, IL13, IL15, anti-CD40, CD40L, IFN-gamma and TNF-alpha. In another embodiment, albumin fusion proteins and/or polynucleotides of the invention may be administered with any interleukin, including, but not limited to, IL-1alpha, IL-1beta, IL-2, IL-3, IL-4, IL-5, IL-6, IL-7, IL-8, IL-9, IL-10, IL-13, IL-14, IL-15, IL-16, IL-17, IL-18, IL-19, IL-20, and IL-21.

[0500] In one embodiment, the albumin fusion proteins and/or polynucleotides of the invention are administered in combination with members of the TNF family. TNF, TNF-related or TNF-like molecules that may be administered with the albumin fusion proteins and/or polynucleotides of the invention include, but are not limited to, soluble forms of TNF-alpha, lymphotoxin-alpha (LT-alpha, also known as TNF-beta), LT-beta (found in complex heterotrimer LT-alpha2-beta), OPGL, FasL, CD27L, CD30L, CD40L, 4-1BBL, DcR3, OX40L, TNF-gamma (International Publication No. WO 96/14328), AIM-I (International Publication No. WO 97/33899), endokine-alpha (International Publication No. WO 98/07880), OPG, and neutrokine-alpha (International Publication No. WO 98/18921, OX40, and nerve growth factor (NGF), and soluble forms of Fas, CD30, CD27, CD40 and 4-IBB, TR2 (International Publication No. WO 96/34095), DR3 (International Publication No. WO 97/33904), DR4 (International Publication No. WO 98/32856), TR5 (International Publication No. WO 98/30693), TRANK, TR9 (International Publication No, WO 98/56892), TR10 (International Publication No. WO 98/54202), 312C2 (International Publication No. WO 98/06842), and TR12, and soluble forms CD154, CD70, and CD153.

[0501] In an additional embodiment, the albumin fusion proteins and/or polynucleotides of the invention are administered in combination with angiogenic proteins. Angiogenic proteins that may be administered with the albumin fusion proteins and/or polynucleotides of the invention include, but are not limited to, Glioma Derived Growth Factor (GDGF), as disclosed in European Patent Number EP-399816; Platelet Derived Growth Factor-A (PDGF-A), as disclosed in European Patent Number EP-682110; Platelet Derived Growth Factor-B (PDGF-B), as disclosed in European Patent Number EP-282317; Placental Growth Factor (PlGF), as disclosed in International Publication Number WO 92/06194; Placental Growth Factor-2 (PlGF-2), as disclosed in Hauser et al., Growth Factors, 4:259-268 (1993); Vascular Endothelial Growth Factor (VEGF), as disclosed in International Publication Number WO 90/13649; Vascular Endothelial Growth Factor-A (VEGF-A), as disclosed in European Patent Number EP-506477; Vascular Endothelial Growth Factor-2 (VEGF-2), as disclosed in International Publication Number WO 96/39515; Vascular Endothelial Growth Factor B (VEGF-3); Vascular Endothelial Growth Factor B-186 (VEGF-B186), as disclosed in International Publication Number WO 96/26736; Vascular Endothelial Growth Factor-D (VEGF-D), as disclosed in International Publication Number WO 98/02543; Vascular Endothelial Growth Factor-D (VEGF-D), as disclosed in International Publication Number WO 98/07832; and Vascular Endothelial Growth Factor-E (VEGF-E), as disclosed in German Patent Number DE19639601. The above mentioned references are herein incorporated by reference in their entireties.

[0502] In an additional embodiment, the albumin fusion proteins and/or polynucleotides of the invention are administered in combination with Fibroblast Growth Factors. Fibroblast Growth Factors that may be administered with the albumin fusion proteins and/or polynucleotides of the invention include, but are not limited to, FGF-1, FGF-2, FGF-3, FGF-4, FGF-5, FGF-6, FGF-7, FGF-8, FGF-9, FGF-10, FGF-11, FGF-12, FGF-13, FGF-14, and FGF-15.

[0503] In an additional embodiment, the albumin fusion proteins and/or polynucleotides of the invention are administered in combination with hematopoietic growth factors. Hematopoietic growth factors that may be administered with the albumin fusion proteins and/or polynucleotides of the invention include, but are not limited to, granulocyte macrophage colony stimulating factor (GM-CSF) (sargramostim, LEUKINE™, PROKINE™), granulocyte colony stimulating factor (G-CSF) (filgrastim, NEUPOGEN™), macrophage colony stimulating factor (M-CSF, CSF-1) erythropoietin (epoetin alfa, EPOGEN™, PROCRIT™), stem cell factor (SCF, c-kit ligand, steel factor), megakaryocyte colony stimulating factor, PIXY321 (a GMCSF/IL-3 fusion protein), interleukins, especially any one or more of IL-1 through IL-12, interferon-gamma, or thrombopoietin.

[0504] In certain embodiments, albumin fusion proteins and/or polynucleotides of the present invention are administered in combination with adrenergic blockers, such as, for example, acebutolol, atenolol, betaxolol, bisoprolol, carteolol, labetalol, metoprolol, nadolol, oxprenolol, penbutolol, pindolol, propranolol, sotalol, and timolol.

[0505] In another embodiment, the albumin fusion proteins and/or polynucleotides of the invention are administered in combination with an antiarrhythmic drug (e.g., adenosine, amidoarone, bretylium, digitalis, digoxin, digitoxin, diliazem, disopyramide, esmolol, flecamide, lidocaine, mexiletine, moricizine, phenyloin, procainamide, N-acetyl procainamide, propafenone, propranolol, quinidine, sotalol, tocamide, and verapamil).

[0506] In another embodiment, the albumin fusion proteins and/or polynucleotides of the invention are administered in combination with diuretic agents, such as carbonic anhydrase-inhibiting agents (e.g., acetazolamide, dichlorphenamide, and methazolamide), osmotic diuretics (e.g., glycerin, isosorbide, mannitol, and urea), diuretics that inhibit Na⁺—K⁺-2Cl⁻ symport (e.g., furosemide, bumetanide, azosemide, piretanide, tripamide, ethacrynic acid, muzolimine, and torsemide), thiazide and thiazide-like diuretics (e.g., bendroflumethiazide, benzthiazide, chlorothiazide, hydrochlorothiazide, hydroflumethiazide, methyclothiazide, polythiazide, trichormethiazide, chlorthalidone, indapamide, metolazone, and quinethazone), potassium sparing diuretics (e.g., amiloride and triamterene), and mineralcorticoid receptor antagonists (e.g., spironolactone, canrenone, and potassium canrenoate).

[0507] In one embodiment, the albumin fusion proteins and/or polynucleotides of the invention are administered in combination with treatments for endocrine and/or hormone imbalance disorders. Treatments for endocrine and/or hormone imbalance disorders include, but are not limited to, ¹²⁷I, radioactive isotopes of iodine such as ¹³¹I and ¹²³I; recombinant growth hormone, such as HUMATROPE™ (recombinant somatropin); growth hormone analogs such as PROTROPIN™ (somatrem); dopamine agonists such as PARLODEL™ (bromocriptine); somatostatin analogs such as SANDOSTATIN™ (octreotide); gonadotropin preparations such as PREGNYL™, A.P.L.™ and PROFASI™ (chorionic gonadotropin (CG)), PERGONAL™ (menotropins), and METRODIN™ (urofollitropin (uFSH)); synthetic human gonadotropin releasing hormone preparations such as FACTREL™ and LUTREPULSE™ (gonadorelin hydrochloride); synthetic gonadotropin agonists such as LUPRON™ (leuprolide acetate), SUPPRELIN™ (histrelin acetate), SYNAREL™ (nafarelin acetate), and ZOLADEX™ (goserelin acetate); synthetic preparations of thyrotropin-releasing hormone such as RELEFACT TRH™ and THYPINONE™ (protirelin); recombinant human TSH such as THYROGEN™; synthetic preparations of the sodium salts of the natural isomers of thyroid hormones such as L-T₄™, SYNTHROID™ and LEVOTHROID™ (levothyroxine sodium), L-T₃™, CYTOMEL™ and TRIOSTAT™ (liothyroine sodium), and THYROLAR™ (liotrix); antithyroid compounds such as 6-n-propylthiouracil (propylthiouracil), 1-methyl-2-mercaptoimidazole and TAPAZOLE™ (methimazole), NEO-MERCAZOLE™ (carbimazole); beta-adrenergic receptor antagonists such as propranolol and esmolol; Ca²⁺ channel blockers; dexamethasone and iodinated radiological contrast agents such as TELEPAQUE™ (iopanoic acid) and ORAGRAFIN™ (sodium ipodate).

[0508] Additional treatments for endocrine and/or hormone imbalance disorders include, but are not limited to, estrogens or congugated estrogens such as ESTRACE™ (estradiol), ESTINYL™ (ethinyl estradiol), PREMARIN™, ESTRATAB™, ORTHO-EST™, OGEN™ and estropipate (estrone), ESTROVIS™ (quinestrol), ESTRADERM™ (estradiol), DELESTROGEN™ and VALERGEN™ (estradiol valerate), DEPO-ESTRADIOL CYPIONATE™ and ESTROJECT LA™ (estradiol cypionate); antiestrogens such as NOLVADEX™ (tamoxifen), SEROPHENE™ and CLOMID™ (clomiphene); progestins such as DURALUTIN™ (hydroxyprogesterone caproate), MPA™ and DEPO-PROVERA™ (medroxyprogesterone acetate), PROVERA™ and CYCRIN™ (MPA), MEGACE™ (megestrol acetate), NORLUTIN™ (norethindrone), and NORLUTATE™ and AYGESTIN™ (norethindrone acetate); progesterone implants such as NORPLANT SYSTEM™ (subdermal implants of norgestrel); antiprogestins such as RU 486™ (mifepristone); hormonal contraceptives such as ENOVID™ (norethynodrel plus mestranol), PROGESTASERT™ (intrauterine device that releases progesterone), LOESTRIN™, BREVICON™, MODICON™, GENORA™, NELONA™, NORINYL™, OVACON-35™ and OVACON-50™ (ethinyl estradiol/norethindrone), LEVLEN™, NORDETTE™, TRI-LEVLEN™ and TRIPHASIL-21™ (ethinyl estradiol/levonorgestrel) LO/OVRAL™ and OVRAL™ (ethinyl estradiol/norgestrel), DEMULEN™ (ethinyl estradiol/ethynodiol diacetate), NORINYL™, ORTHO-NOVUM™, NORETHIN™, GENORA™, and NELOVA™ (norethindrone/mestranol), DESOGEN™ and ORTHO-CEPT™ (ethinyl estradiol/desogestrel), ORTHO-CYCLENT™ and ORTHO-TRICYCLEN™ (ethinyl estradiol/norgestimate), MICRONOR™ and NOR-QD™ (norethindrone), and OVRETTE™ (norgestrel).

[0509] Additional treatments for endocrine and/or hormone imbalance disorders include, but are not limited to, testosterone esters such as methenolone acetate and testosterone undecanoate; parenteral and oral androgens such as TESTOJECT-50™ (testosterone), TESTEX™ (testosterone propionate), DELATESTRYL™ (testosterone enanthate), DEPO-TESTOSTERONE™ (testosterone cypionate), DANOCRINE™ (danazol), HALOTESTIN™ (fluoxymesterone), ORETON METHYL™, TESTRED™ and VIRILON™ (methyltestosterone), and OXANDRIN™ (oxandrolone); testosterone transdermal systems such as TESTODERM™; androgen receptor antagonist and 5-alpha-reductase inhibitors such as ANDROCUR™ (cyproterone acetate), EULEXIN™ (flutamide), and PROSCAR™ (finasteride); adrenocorticotropic hormone preparations such as CORTROSYN™ (cosyntropin); adrenocortical steroids and their synthetic analogs such as ACLOVATE™ (alclometasone dipropionate), CYCLOCORT™ (amcinonide), BECLOVENT™ and VANCERIL™ (beclomethasone dipropionate), CELESTONE™ (betamethasone), BENISONE™ and UTICORT™ (betamethasone benzoate), DIPROSONE™ (betamethasone dipropionate), CELESTONE PHOSPHATE™ (betamethasone sodium phosphate), CELESTONE SOLUSPAN™ (betamethasone sodium phosphate and acetate), BETA-VAL™ and VALISONE™ (betamethasone valerate), TEMOVATE™ (clobetasol propionate), CLODERM™ (clocortolone pivalate), CORTEF™ and HYDROCORTONE™ (cortisol (hydrocortisone)), HYDROCORTONE ACETATE™ (cortisol (hydrocortisone) acetate), LOCOID™ (cortisol (hydrocortisone) butyrate), HYDROCORTONE PHOSPHATE™ (cortisol (hydrocortisone) sodium phosphate), A-HYDROCORT™ and SOLU CORTEF™ (cortisol (hydrocortisone) sodium succinate), WESTCORT™ (cortisol (hydrocortisone) valerate), CORTISONE ACETATE™ (cortisone acetate), DESOWEN™ and TRIDESILON™ (desonide), TOPICORT™ (desoximetasone), DECADRON™ (dexamethasone), DECADRON LA™ (dexamethasone acetate), DECADRON PHOSPHATE™ and HEXADROL PHOSPHATE™ (dexamethasone sodium phosphate), FLORONE™ and MAXIFLOR™ (diflorasone diacetate), FLORINEF ACETATE™ (fludrocortisone acetate), AEROBID™ and NASALIDE™ (flunisolide), FLUONID™ and SYNALAR™ (fluocinolone acetonide), LIDEX™ (fluocinonide), FLUOR-OP™ and FML™ (fluorometholone), CORDRAN™ (flurandrenolide), HALOG™ (halcinonide), HMS LIZUIFILM™ (medrysone), MEDROL™ (methylprednisolone), DEPO-MEDROL™ and MEDROL ACETATE™ (methylprednisone acetate), A-METHAPRED™ and SOLUMEDROL™ (methylprednisolone sodium succinate), ELOCON™ (mometasone furoate), HALDRONE™ (paramethasone acetate), DELTA-CORTEF™ (prednisolone), ECONOPRED™ (prednisolone acetate), HYDELTRASOL™ (prednisolone sodium phosphate), HYDELTRA-T.B.A™ (prednisolone tebutate), DELTASONE™ (prednisone), ARISTOCORT™ and KENACORT™ (triamcinolone), KENALOG™ (triamcinolone acetonide), ARISTOCORT™ and KENACORT DIACETATE™ (triamcinolone diacetate), and ARISTOSPAN™ (triamcinolone hexacetonide); inhibitors of biosynthesis and action of adrenocortical steroids such as CYTADREN™ (aminoglutethimide), NIZORAL™ (ketoconazole), MODRASTANE™ (trilostane), and METOPIRONE™ (metyrapone); bovine, porcine or human insulin or mixtures thereof; insulin analogs; recombinant human insulin such as HUMULIN™ and NOVOLIN™; oral hypoglycemic agents such as ORAMIDE™ and ORINASE™ (tolbutamide), DIABINESE™ (chlorpropamide), TOLAMIDE™ and TOLINASE™ (tolazamide), DYMELOR™ (acetohexamide), glibenclamide, MICRONASE™, DTBETA™ and GLYNASE™ (glyburide), GLUCOTROL™ (glipizide), and DIAMICRON™ (gliclazide), GLUCOPHAGE™ (metformin), ciglitazone, pioglitazone, and alpha-glucosidase inhibitors; bovine or porcine glucagon; somatostatins such as SANDOSTATIN™ (octreotide); and diazoxides such as PROGLYCEM™ (diazoxide).

[0510] In one embodiment, the albumin fusion proteins and/or polynucleotides of the invention are administered in combination with treatments for uterine motility disorders. Treatments for uterine motility disorders include, but are not limited to, estrogen drugs such as conjugated estrogens (e.g., PREMARIN® and ESTRATAB®), estradiols (e.g., CLIMARA® and ALORA®), estropipate, and chlorotrianisene; progestin drugs (e.g., AMEN® (medroxyprogesterone), MICRONOR® (norethidrone acetate), PROMETRIUM® progesterone, and megestrol acetate); and estrogen/progesterone combination therapies such as, for example, conjugated estrogens/medroxyprogesterone (e.g., PREMPRO™ and PREMPHASE®) and norethindrone acetate/ethinyl estsradiol (e.g., FEMHRT™).

[0511] In an additional embodiment, the albumin fusion proteins and/or polynucleotides of the invention are administered in combination with drugs effective in treating iron deficiency and hypochromic anemias, including but not limited to, ferrous sulfate (iron sulfate, FEOSOL™), ferrous fumarate (e.g., FEOSTAT™), ferrous gluconate (e.g., FERGON™), polysaccharide-iron complex (e.g., NIFEREX™), iron dextran injection (e.g., INFED™), cupric sulfate, pyroxidine, riboflavin, Vitamin B₁₂, cyancobalamin injection (e.g., REDISOL™, RUBRAMIN PC™), hydroxocobalamin, folic acid (e.g., FOLVITE™), leucovorin (folinic acid, 5-CHOH4PteGlu, citrovorum factor) or WELLCOVORIN (Calcium salt of leucovorin), transferrin or ferritin.

[0512] In certain embodiments, the albumin fusion proteins and/or polynucleotides of the invention are administered in combination with agents used to treat psychiatric disorders. Psychiatric drugs that may be administered with the albumin fusion proteins and/or polynucleotides of the invention include, but are not limited to, antipsychotic agents (e.g., chlorpromazine, chlorprothixene, clozapine, fluphenazine, haloperidol, loxapine, mesoridazine, molindone, olanzapine, perphenazine, pimozide, quetiapine, risperidone, thioridazine, thiothixene, trifluoperazine, and triflupromazine), antimanic agents (e.g., carbamazepine, divalproex sodium, lithium carbonate, and lithium citrate), antidepressants (e.g., amitriptyline, amoxapine, bupropion, citalopram, clomipramine, desipramine, doxepin, fluvoxamine, fluoxetine, imipramine, isocarboxazid, maprotiline, mirtazapine, nefazodone, nortriptyline, paroxetine, phenelzine, protriptyline, sertraline, tranylcypromine, trazodone, trimipramine, and venlafaxine), antianxiety agents (e.g., alprazolam, buspirone, chlordiazepoxide, clorazepate, diazepam, halazepam, lorazepam, oxazepam, and prazepam), and stimulants (e.g., d-amphetamine, methylphenidate, and pemoline).

[0513] In other embodiments, the albumin fusion proteins and/or polynucleotides of the invention are administered in combination with agents used to treat neurological disorders. Neurological agents that may be administered with the albumin fusion proteins and/or polynucleotides of the invention include, but are not limited to, antiepileptic agents (e.g., carbamazepine, clonazepam, ethosuximide, phenobarbital, phenyloin, primidone, valproic acid, divalproex sodium, felbamate, gabapentin, lamotrigine, levetiracetam, oxcarbazepine, tiagabine, topiramate, zonisamide, diazepam, lorazepam, and clonazepam), antiparkinsonian agents (e.g., levodopa/carbidopa, selegiline, amantidine, bromocriptine, pergolide, ropinirole, pramipexole, benztropine; biperiden; ethopropazine; procyclidine; trihexyphenidyl, tolcapone), and ALS therapeutics (e.g. riluzole).

[0514] In another embodiment, albumin fusion proteins and/or polynucleotides of the invention are administered in combination with vasodilating agents and/or calcium channel blocking agents. Vasodilating agents that may be administered with the albumin fusion proteins and/or polynucleotides of the invention include, but are not limited to, Angiotensin Converting Enzyme (ACE) inhibitors (e.g., papaverine, isoxsuprine, benazepril, captopril, cilazapril, enalapril, enalaprilat, fosinopril, lisinopril, moexipril, perindopril, quinapril, ramipril, spirapril, trandolapril, and nylidrin), and nitrates (e.g., isosorbide dinitrate, isosorbide mononitrate, and nitroglycerin). Examples of calcium channel blocking agents that may be administered in combination with the albumin fusion proteins and/or polynucleotides of the invention include, but are not limited to amlodipine, bepridil, diltiazem, felodipine, flunarizine, isradipine, nicardipine, nifedipine, nimodipine, and verapamil.

[0515] In certain embodiments, the albumin fusion proteins and/or polynucleotides of the invention are administered in combination with treatments for gastrointestinal disorders. Treatments for gastrointestinal disorders that may be administered with the albumin fusion protein and/or polynucleotide of the invention include, but are not limited to, H₂ histamine receptor antagonists (e.g., TAGAMET™ (cimetidine), ZANTAC™ (ranitidine), PEPCID™ (famotidine), and AXID™ (nizatidine)); inhibitors of H⁺, K⁺ ATPase (e.g., PREVACID™ (lansoprazole) and PRILOSEC™ (omeprazole)); Bismuth compounds (e.g., PEPTO-BISMOL™ (bismuth subsalicylate) and DE-NOL™ (bismuth subcitrate)); various antacids; sucralfate; prostaglandin analogs (e.g. CYTOTEC™ (misoprostol)); muscarinic cholinergic antagonists; laxatives (e.g., surfactant laxatives, stimulant laxatives, saline and osmotic laxatives); antidiarrheal agents (e.g., LOMOTEL™ (diphenoxylate), MOTOFEN™ (diphenoxin), and IMODIUM™ (loperamide hydrochloride)), synthetic analogs of somatostatin such as SANDOSTATIN™ (octreotide), antiemetic agents (e.g., ZOFRAN™ (ondansetron), KYTRIL™ (granisetron hydrochloride), tropisetron, dolasetron, metoclopramide, chlorpromazine, perphenazine, prochlorperazine, promethazine, thiethylperazine, triflupromazine, domperidone, haloperidol, droperidol, trimethobenzamide, dexamethasone, methylprednisolone, dronabinol, and nabilone); D2 antagonists (e.g., metoclopramide, trimethobenzamide and chlorpromazine); bile salts; chenodeoxycholic acid; ursodeoxycholic acid; and pancreatic enzyme preparations such as pancreatin and pancrelipase.

[0516] In additional embodiments, the albumin fusion proteins and/or polynucleotides of the invention are administered in combination with other therapeutic or prophylactic regimens, such as, for example, radiation therapy.

[0517] The invention also provides a pharmaceutical pack or kit comprising one or more containers filled with one or more of the ingredients of the pharmaceutical compositions comprising albumin fusion proteins of the invention. Optionally associated with such container(s) can be a notice in the form prescribed by a governmental agency regulating the manufacture, use or sale of pharmaceuticals or biological products, which notice reflects approval by the agency of manufacture, use or sale for human administration.

[0518] Gene Therapy

[0519] Constructs encoding albumin fusion proteins of the invention can be used as a part of a gene therapy protocol to deliver therapeutically effective doses of the albumin fusion protein. A preferred approach for in vivo introduction of nucleic acid into a cell is by use of a viral vector containing nucleic acid, encoding an albumin fusion protein of the invention. Infection of cells with a viral vector has the advantage that a large proportion of the targeted cells can receive the nucleic acid. Additionally, molecules encoded within the viral vector, e.g., by a cDNA contained in the viral vector, are expressed efficiently in cells which have taken up viral vector nucleic acid.

[0520] Retrovirus vectors and adeno-associated virus vectors can be used as a recombinant gene delivery system for the transfer of exogenous nucleic acid molecules encoding albumin fusion proteins in vivo. These vectors provide efficient delivery of nucleic acids into cells, and the transferred nucleic acids are stably integrated into the chromosomal DNA of the host. The development of specialized cell lines (termed “packaging cells”) which produce only replication-defective retroviruses has increased the utility of retroviruses for gene therapy, and defective retroviruses are characterized for use in gene transfer for gene therapy purposes (for a review see Miller, A. D. (1990) Blood 76:27 1). A replication defective retrovirus can be packaged into virions which can be used to infect a target cell through the use of a helper virus by standard techniques. Protocols for producing recombinant retroviruses and for infecting cells in vitro or in vivo with such viruses can be found in Current Protocols in Molecular Biology, Ausubel, F. M. et al., (eds.) Greene Publishing Associates, (1989), Sections 9.10-9.14 and other standard laboratory manuals.

[0521] Another viral gene delivery system useful in the present invention uses adenovirus-derived vectors. The genome of an adenovirus can be manipulated such that it encodes and expresses a gene product of interest but is inactivated in terms of its ability to replicate in a normal lytic viral life cycle. See, for example, Berkner et al., BioTechniques 6:616 (1988); Rosenfeld et al., Science 252:431-434 (1991); and Rosenfeld et al., Cell 68:143-155 (1992). Suitable adenoviral vectors derived from the adenovirus strain Ad type 5 d1324 or other strains of adenovirus (e.g., Ad2, Ad3, Ad7 etc.) are known to those skilled in the art. Recombinant adenoviruses can be advantageous in certain circumstances in that they are not capable of infecting nondividing cells and can be used to infect a wide variety of cell types, including epithelial cells (Rosenfeld et al., (1992) cited supra). Furthermore, the virus particle is relatively stable and amenable to purification and concentration, and as above, can be modified so as to affect the spectrum of infectivity. Additionally, introduced adenoviral DNA (and foreign DNA contained therein) is not integrated into the genome of a host cell but remains episomal, thereby avoiding potential problems that can occur as a result of insertional mutagenesis in situations where introduced DNA becomes integrated into the host genome (e.g., retroviral DNA). Moreover, the carrying capacity of the adenoviral genome for foreign DNA is large (up to 8 kilobases) relative to other gene delivery vectors (Berliner et al., cited supra; Haj-Ahmand et al., J. Virol. 57:267 (1986)).

[0522] In another embodiment, non-viral gene delivery systems of the present invention rely on endocytic pathways for the uptake of the subject nucleotide molecule by the targeted cell. Exemplary gene delivery systems of this type include liposomal derived systems, poly-lysine conjugates, and artificial viral envelopes. In a representative embodiment, a nucleic acid molecule encoding an albumin fusion protein of the invention can be entrapped in liposomes bearing positive charges on their surface (e.g., lipofectins) and (optionally) which are tagged with antibodies against cell surface antigens of the target tissue (Mizuno et al. (1992) No Shinkei Geka 20:547-5 5 1; PCT publication WO91/06309; Japanese patent application 1047381; and European patent publication EP-A-43075).

[0523] Gene delivery systems for a gene encoding an albumin fusion protein of the invention can be introduced into a patient by any of a number of methods. For instance, a pharmaceutical preparation of the gene delivery system can be introduced systemically, e.g. by intravenous injection, and specific transduction of the protein in the target cells occurs predominantly from specificity of transfection provided by the gene delivery vehicle, cell-type or tissue-type expression due to the transcriptional regulatory sequences controlling expression of the receptor gene, or a combination thereof. In other embodiments, initial delivery of the recombinant gene is more limited with introduction into the animal being quite localized. For example, the gene delivery vehicle can be introduced by catheter (see U.S. Pat. No. 5,328,470) or by Stereotactic injection (e.g. Chen et al. (1994) PNAS 91: 3 054-3 05 7). The pharmaceutical preparation of the gene therapy construct can consist essentially of the gene delivery system in an acceptable diluent, or can comprise a slow release matrix in which the gene delivery vehicle is imbedded. Where the albumin fusion protein can be produced intact from recombinant cells, e.g. retroviral vectors, the pharmaceutical preparation can comprise one or more cells which produce the albumin fusion protein.

[0524] Additional Gene Therapy Methods

[0525] Also encompassed by the invention are gene therapy methods for treating or preventing disorders, diseases and conditions. The gene therapy methods relate to the introduction of nucleic acid (DNA, RNA and antisense DNA or RNA) sequences into an animal to achieve expression of an albumin fusion protein of the invention. This method requires a polynucleotide which codes for an albumin fusion protein of the present invention operatively linked to a promoter and any other genetic elements necessary for the expression of the fusion protein by the target tissue. Such gene therapy and delivery techniques are known in the art, see, for example, WO90/11092, which is herein incorporated by reference.

[0526] Thus, for example, cells from a patient may be engineered with a polynucleotide (DNA or RNA) comprising a promoter operably linked to a polynucleotide encoding an albumin fusion protein of the present invention ex vivo, with the engineered cells then being provided to a patient to be treated with the fusion protein of the present invention. Such methods are well-known in the art. For example, see Belldegrun, A., et al., J. Natl. Cancer Inst. 85: 207-216 (1993); Ferrantini, M. et al., Cancer Research 53: 1107-1112 (1993); Ferrantini, M. et al., J. Immunology 153: 4604-4615 (1994); Kaido, T., et al., Int. J. Cancer 60: 221-229 (1995); Ogura, H., et al., Cancer Research 50: 5102-5106 (1990); Santodonato, L., et al., Human Gene Therapy 7:1-10 (1996); Santodonato, L., et al., Gene Therapy 4:1246-1255 (1997); and Zhang, J.-F. et al., Cancer Gene Therapy 3: 31-38 (1996)), which are herein incorporated by reference. In one embodiment, the cells which are engineered are arterial cells. The arterial cells may be reintroduced into the patient through direct injection to the artery, the tissues surrounding the artery, or through catheter injection.

[0527] As discussed in more detail below, the polynucleotide constructs can be delivered by any method that delivers injectable materials to the cells of an animal, such as, injection into the interstitial space of tissues (heart, muscle, skin, lung, liver, and the like). The polynucleotide constructs may be delivered in a pharmaceutically acceptable liquid or aqueous carrier.

[0528] In one embodiment, polynucleotides encoding the albumin fusion proteins of the present invention is delivered as a naked polynucleotide. The term “naked” polynucleotide, DNA or RNA refers to sequences that are free from any delivery vehicle that acts to assist, promote or facilitate entry into the cell, including viral sequences, viral particles, liposome formulations, lipofectin or precipitating agents and the like. However, polynucleotides encoding the albumin fusion proteins of the present invention can also be delivered in liposome formulations and lipofectin formulations and the like can be prepared by methods well known to those skilled in the art. Such methods are described, for example, in U.S. Pat. Nos. 5,593,972, 5,589,466, and 5,580,859, which are herein incorporated by reference.

[0529] The polynucleotide vector constructs used in the gene therapy method are preferably constructs that will not integrate into the host genome nor will they contain sequences that allow for replication. Appropriate vectors include pWLNEO, pSV2CAT, pOG44, pXT1 and pSG available from Stratagene; pSVK3, pBPV, pMSG and pSVL available from Pharmacia; and pEF1/V5, pcDNA3.1, and pRc/CMV2 available from Invitrogen. Other suitable vectors will be readily apparent to the skilled artisan.

[0530] Any strong promoter known to those skilled in the art can be used for driving the expression of the polynucleotide sequence. Suitable promoters include adenoviral promoters, such as the adenoviral major late promoter; or heterologous promoters, such as the cytomegalovirus (CMV) promoter; the respiratory syncytial virus (RSV) promoter; inducible promoters, such as the MMT promoter, the metallothionein promoter; heat shock promoters; the albumin promoter; the ApoAI promoter; human globin promoters; viral thymidine kinase promoters, such as the Herpes Simplex thymidine kinase promoter; retroviral LTRs; the b-actin promoter; and human growth hormone promoters. The promoter also may be the native promoter for the gene corresponding to the Therapeutic protein portion of the albumin fusion proteins of the invention.

[0531] Unlike other gene therapy techniques, one major advantage of introducing naked nucleic acid sequences into target cells is the transitory nature of the polynucleotide synthesis in the cells. Studies have shown that non-replicating DNA sequences can be introduced into cells to provide production of the desired polypeptide for periods of up to six months.

[0532] The polynucleotide construct can be delivered to the interstitial space of tissues within the an animal, including of muscle, skin, brain, lung, liver, spleen, bone marrow, thymus, heart, lymph, blood, bone, cartilage, pancreas, kidney, gall bladder, stomach, intestine, testis, ovary, uterus, rectum, nervous system, eye, gland, and connective tissue. Interstitial space of the tissues comprises the intercellular, fluid, mucopolysaccharide matrix among the reticular fibers of organ tissues, elastic fibers in the walls of vessels or chambers, collagen fibers of fibrous tissues, or that same matrix within connective tissue ensheathing muscle cells or in the lacunae of bone. It is similarly the space occupied by the plasma of the circulation and the lymph fluid of the lymphatic channels. Delivery to the interstitial space of muscle tissue is preferred for the reasons discussed below. They may be conveniently delivered by injection into the tissues comprising these cells. They are preferably delivered to and expressed in persistent, non-dividing cells which are differentiated, although delivery and expression may be achieved in non-differentiated or less completely differentiated cells, such as, for example, stem cells of blood or skin fibroblasts. In vivo muscle cells are particularly competent in their ability to take up and express polynucleotides.

[0533] For the naked nucleic acid sequence injection, an effective dosage amount of DNA or RNA will be in the range of from about 0.05 mg/kg body weight to about 50 mg/kg body weight. Preferably the dosage will be from about 0.005 mg/kg to about 20 mg/kg and more preferably from about 0.05 mg/kg to about 5 mg/kg. Of course, as the artisan of ordinary skill will appreciate, this dosage will vary according to the tissue site of injection. The appropriate and effective dosage of nucleic acid sequence can readily be determined by those of ordinary skill in the art and may depend on the condition being treated and the route of administration.

[0534] The preferred route of administration is by the parenteral route of injection into the interstitial space of tissues. However, other parenteral routes may also be used, such as, inhalation of an aerosol formulation particularly for delivery to lungs or bronchial tissues, throat or mucous membranes of the nose. In addition, naked DNA constructs can be delivered to arteries during angioplasty by the catheter used in the procedure.

[0535] The naked polynucleotides are delivered by any method known in the art, including, but not limited to, direct needle injection at the delivery site, intravenous injection, topical administration, catheter infusion, and so-called “gene guns”. These delivery methods are known in the art.

[0536] The constructs may also be delivered with delivery vehicles such as viral sequences, viral particles, liposome formulations, lipofectin, precipitating agents, etc. Such methods of delivery are known in the art.

[0537] In certain embodiments, the polynucleotide constructs are complexed in a liposome preparation. Liposomal preparations for use in the instant invention include cationic (positively charged), anionic (negatively charged) and neutral preparations. However, cationic liposomes are particularly preferred because a tight charge complex can be formed between the cationic liposome and the polyanionic nucleic acid. Cationic liposomes have been shown to mediate intracellular delivery of plasmid DNA (Felgner et al., Proc. Natl. Acad. Sci. USA (1987) 84:7413-7416, which is herein incorporated by reference); mRNA (Malone et al., Proc. Natl. Acad. Sci. USA (1989) 86:6077-6081, which is herein incorporated by reference); and purified transcription factors (Debs et al., J. Biol. Chem. (1990) 265:10189-10192, which is herein incorporated by reference), in functional form.

[0538] Cationic liposomes are readily available. For example, N[1-2,3-dioleyloxy)propyl]-N,N,N-triethylammonium (DOTMA) liposomes are particularly useful and are available under the trademark Lipofectin, from GIBCO BRL, Grand Island, N.Y. (See, also, Felgner et al., Proc. Natl. Acad. Sci. USA (1987) 84:7413-7416, which is herein incorporated by reference). Other commercially available liposomes include transfectace (DDAB/DOPE) and DOTAP/DOPE (Boehringer).

[0539] Other cationic liposomes can be prepared from readily available materials using techniques well known in the art. See, e.g. PCT Publication No. WO 90/11092 (which is herein incorporated by reference) for a description of the synthesis of DOTAP (1,2-bis(oleoyloxy)-3-(trimethylammonio)propane) liposomes. Preparation of DOTMA liposomes is explained in the literature, see, e.g., P. Felgner et al., Proc. Natl. Acad. Sci. USA 84:7413-7417, which is herein incorporated by reference. Similar methods can be used to prepare liposomes from other cationic lipid materials.

[0540] Similarly, anionic and neutral liposomes are readily available, such as from Avanti Polar Lipids (Birmingham, Ala.), or can be easily prepared using readily available materials. Such materials include phosphatidyl, choline, cholesterol, phosphatidyl ethanolamine, dioleoylphosphatidyl choline (DOPC), dioleoylphosphatidyl glycerol (DOPG), dioleoylphoshatidyl ethanolamine (DOPE), among others. These materials can also be mixed with the DOTMA and DOTAP starting materials in appropriate ratios. Methods for making liposomes using these materials are well known in the art.

[0541] For example, commercially dioleoylphosphatidyl choline (DOPC), dioleoylphosphatidyl glycerol (DOPG), and dioleoylphosphatidyl ethanolamine (DOPE) can be used in various combinations to make conventional liposomes, with or without the addition of cholesterol. Thus, for example, DOPG/DOPC vesicles can be prepared by drying 50 mg each of DOPG and DOPC under a stream of nitrogen gas into a sonication vial. The sample is placed under a vacuum pump overnight and is hydrated the following day with deionized water. The sample is then sonicated for 2 hours in a capped vial, using a Heat Systems model 350 sonicator equipped with an inverted cup (bath type) probe at the maximum setting while the bath is circulated at 15EC. Alternatively, negatively charged vesicles can be prepared without sonication to produce multilamellar vesicles or by extrusion through nucleopore membranes to produce unilamellar vesicles of discrete size. Other methods are known and available to those of skill in the art.

[0542] The liposomes can comprise multilamellar vesicles (MLVs), small unilamellar vesicles (SUVs), or large unilamellar vesicles (LUVs), with SUVs being preferred. The various liposome-nucleic acid complexes are prepared using methods well known in the art. See, e.g., Straubinger et al., Methods of Immunology (1983), 101:512-527, which is herein incorporated by reference. For example, MLVs containing nucleic acid can be prepared by depositing a thin film of phospholipid on the walls of a glass tube and subsequently hydrating with a solution of the material to be encapsulated. SUVs are prepared by extended sonication of MLVs to produce a homogeneous population of unilamellar liposomes. The material to be entrapped is added to a suspension of preformed MLVs and then sonicated. When using liposomes containing cationic lipids, the dried lipid film is resuspended in an appropriate solution such as sterile water or an isotonic buffer solution such as 10 mM Tris/NaCl, sonicated, and then the preformed liposomes are mixed directly with the DNA. The liposome and DNA form a very stable complex due to binding of the positively charged liposomes to the cationic DNA. SUVs find use with small nucleic acid fragments. LUVs are prepared by a number of methods, well known in the art. Commonly used methods include Ca²⁺-EDTA chelation (Papahadjopoulos et al., Biochim. Biophys. Acta (1975) 394:483; Wilson et al., Cell 17:77 (1979)); ether injection (Deamer, D. and Bangham, A., Biochim. Biophys. Acta 443:629 (1976); Ostro et al., Biochem. Biophys. Res. Commun. 76:836 (1977); Fraley et al., Proc. Natl. Acad. Sci. USA 76:3348 (1979)); detergent dialysis (Enoch, H. and Strittmatter, P., Proc. Natl. Acad. Sci. USA 76:145 (1979)); and reverse-phase evaporation (REV) (Fraley et al., J. Biol. Chem. 255:10431 (1980); Szoka, F. and Papahadjopoulos, D., Proc. Natl. Acad. Sci. USA 75:145 (1978); Schaefer-Ridder et al., Science 215:166 (1982)), which are herein incorporated by reference.

[0543] Generally, the ratio of DNA to liposomes will be from about 10:1 to about 1:10. Preferably, the ration will be from about 5:1 to about 1:5. More preferably, the ration will be about 3:1 to about 1:3. Still more preferably, the ratio will be about 1:1.

[0544] U.S. Pat. No. 5,676,954 (which is herein incorporated by reference) reports on the injection of genetic material, complexed with cationic liposomes carriers, into mice. U.S. Pat. Nos. 4,897,355, 4,946,787, 5,049,386, 5,459,127, 5,589,466, 5,693,622, 5,580,859, 5,703,055, and international publication no. WO 94/9469 (which are herein incorporated by reference) provide cationic lipids for use in transfecting DNA into cells and mammals. U.S. Pat. Nos. 5,589,466, 5,693,622, 5,580,859, 5,703,055, and international publication no. WO 94/9469 provide methods for delivering DNA-cationic lipid complexes to mammals.

[0545] In certain embodiments, cells are engineered, ex vivo or in vivo, using a retroviral particle containing RNA which comprises a sequence encoding an albumin fusion protein of the present invention. Retroviruses from which the retroviral plasmid vectors may be derived include, but are not limited to, Moloney Murine Leukemia Virus, spleen necrosis virus, Rous sarcoma Virus, Harvey Sarcoma Virus, avian leukosis virus, gibbon ape leukemia virus, human immunodeficiency virus, Myeloproliferative Sarcoma Virus, and mammary tumor virus.

[0546] The retroviral plasmid vector is employed to transduce packaging cell lines to form producer cell lines. Examples of packaging cells which may be transfected include, but are not limited to, the PE501, PA317, R-2, R-AM, PAl2, T19-14X, VT-19-17-H2, RCRE, RCRIP, GP+E-86, GP+envAm12, and DAN cell lines as described in Miller, Human Gene Therapy 1:5-14 (1990), which is incorporated herein by reference in its entirety. The vector may transduce the packaging cells through any means known in the art. Such means include, but are not limited to, electroporation, the use of liposomes, and CaPO₄ precipitation. In one alternative, the retroviral plasmid vector may be encapsulated into a liposome, or coupled to a lipid, and then administered to a host.

[0547] The producer cell line generates infectious retroviral vector particles which include polynucleotide encoding an albumin fusion protein of the present invention. Such retroviral vector particles then may be employed, to transduce eukaryotic cells, either in vitro or in vivo. The transduced eukaryotic cells will express a fusion protin of the present invention.

[0548] In certain other embodiments, cells are engineered, ex vivo or in vivo, with polynucleotide contained in an adenovirus vector. Adenovirus can be manipulated such that it encodes and expresses fusion protein of the present invention, and at the same time is inactivated in terms of its ability to replicate in a normal lytic viral life cycle. Adenovirus expression is achieved without integration of the viral DNA into the host cell chromosome, thereby alleviating concerns about insertional mutagenesis. Furthermore, adenoviruses have been used as live enteric vaccines for many years with an excellent safety profile (Schwartz et al. Am. Rev. Respir. Dis. 109:233-238 (1974)). Finally, adenovirus mediated gene transfer has been demonstrated in a number of instances including transfer of alpha-1-antitrypsin and CFTR to the lungs of cotton rats (Rosenfeld, M. A. et al. (1991) Science 252:431-434; Rosenfeld et al., (1992) Cell 68:143-155). Furthermore, extensive studies to attempt to establish adenovirus as a causative agent in human cancer were uniformly negative (Green, M. et al. (1979) Proc. Natl. Acad. Sci. USA 76:6606).

[0549] Suitable adenoviral vectors useful in the present invention are described, for example, in Kozarsky and Wilson, Curr. Opin. Genet. Devel. 3:499-503 (1993); Rosenfeld et al., Cell 68:143-155 (1992); Engelhardt et al., Human Genet. Ther. 4:759-769 (1993); Yang et al., Nature Genet. 7:362-369 (1994); Wilson et al., Nature 365:691-692 (1993); and U.S. Pat. No. 5,652,224, which are herein incorporated by reference. For example, the adenovirus vector Ad2 is useful and can be grown in human 293 cells. These cells contain the E1 region of adenovirus and constitutively express E1a and E1b, which complement the defective adenoviruses by providing the products of the genes deleted from the vector. In addition to Ad2, other varieties of adenovirus (e.g., Ad3, Ad5, and Ad7) are also useful in the present invention.

[0550] Preferably, the adenoviruses used in the present invention are replication deficient. Replication deficient adenoviruses require the aid of a helper virus and/or packaging cell line to form infectious particles. The resulting virus is capable of infecting cells and can express a polynucleotide of interest which is operably linked to a promoter, but cannot replicate in most cells. Replication deficient adenoviruses may be deleted in one or more of all or a portion of the following genes: E1a, E1b, E3, E4, Eta, or L1 through L5.

[0551] In certain other embodiments, the cells are engineered, ex vivo or in vivo, using an adeno-associated virus (AAV). AAVs are naturally occurring defective viruses that require helper viruses to produce infectious particles (Muzyczka, N., Curr. Topics in Microbiol. Immunol. 158:97 (1992)). It is also one of the few viruses that may integrate its DNA into non-dividing cells. Vectors containing as little as 300 base pairs of AAV can be packaged and can integrate, but space for exogenous DNA is limited to about 4.5 kb. Methods for producing and using such AAVs are known in the art. See, for example, U.S. Pat. Nos. 5,139,941, 5,173,414, 5,354,678, 5,436,146, 5,474,935, 5,478,745, and 5,589,377.

[0552] For example, an appropriate AAV vector for use in the present invention will include all the sequences necessary for DNA replication, encapsidation, and host-cell integration. The polynucleotide construct is inserted into the AAV vector using standard cloning methods, such as those found in Sambrook et al., Molecular Cloning: A Laboratory Manual, Cold Spring Harbor Press (1989). The recombinant AAV vector is then transfected into packaging cells which are infected with a helper virus, using any standard technique, including lipofection, electroporation, calcium phosphate precipitation, etc. Appropriate helper viruses include adenoviruses, cytomegaloviruses, vaccinia viruses, or herpes viruses. Once the packaging cells are transfected and infected, they will produce infectious AAV viral particles which contain the polynucleotide construct. These viral particles are then used to transduce eukaryotic cells, either ex vivo or in vivo. The transduced cells will contain the polynucleotide construct integrated into its genome, and will express a fsuion protein of the invention.

[0553] Another method of gene therapy involves operably associating heterologous control regions and endogenous polynucleotide sequences (e.g. encoding a polypeptide of the present invention) via homologous recombination (see, e.g., U.S. Pat. No. 5,641,670, issued Jun. 24, 1997; International Publication No. WO 96/29411, published Sep. 26, 1996; International Publication No. WO 94/12650, published Aug. 4, 1994; Koller et al., Proc. Natl. Acad. Sci. USA 86:8932-8935 (1989); and Zijlstra et al., Nature 342:435-438 (1989), which are herein encorporated by reference. This method involves the activation of a gene which is present in the target cells, but which is not normally expressed in the cells, or is expressed at a lower level than desired.

[0554] Polynucleotide constructs are made, using standard techniques known in the art, which contain the promoter with targeting sequences flanking the promoter. Suitable promoters are described herein. The targeting sequence is sufficiently complementary to an endogenous sequence to permit homologous recombination of the promoter-targeting sequence with the endogenous sequence. The targeting sequence will be sufficiently near the 5′ end of the desired endogenous polynucleotide sequence so the promoter will be operably linked to the endogenous sequence upon homologous recombination.

[0555] The promoter and the targeting sequences can be amplified using PCR. Preferably, the amplified promoter contains distinct restriction enzyme sites on the 5′ and 3′ ends. Preferably, the 3′ end of the first targeting sequence contains the same restriction enzyme site as the 5′ end of the amplified promoter and the 5′ end of the second targeting sequence contains the same restriction site as the 3′ end of the amplified promoter. The amplified promoter and targeting sequences are digested and ligated together.

[0556] The promoter-targeting sequence construct is delivered to the cells, either as naked polynucleotide, or in conjunction with transfection-facilitating agents, such as liposomes, viral sequences, viral particles, whole viruses, lipofection, precipitating agents, etc., described in more detail above. The P promoter-targeting sequence can be delivered by any method, included direct needle injection, intravenous injection, topical administration, catheter infusion, particle accelerators, etc. The methods are described in more detail below.

[0557] The promoter-targeting sequence construct is taken up by cells. Homologous recombination between the construct and the endogenous sequence takes place, such that an endogenous sequence is placed under the control of the promoter. The promoter then drives the expression of the endogenous sequence.

[0558] The polynucleotide encoding an albumin fusion protein of the present invention may contain a secretory signal sequence that facilitates secretion of the protein. Typically, the signal sequence is positioned in the coding region of the polynucleotide to be expressed towards or at the 5′ end of the coding region. The signal sequence may be homologous or heterologous to the polynucleotide of interest and may be homologous or heterologous to the cells to be transfected. Additionally, the signal sequence may be chemically synthesized using methods known in the art.

[0559] Any mode of administration of any of the above-described polynucleotides constructs can be used so long as the mode results in the expression of one or more molecules in an amount sufficient to provide a therapeutic effect. This includes direct needle injection, systemic injection, catheter infusion, biolistic injectors, particle accelerators (i.e., “gene guns”), gelfoam sponge depots, other commercially available depot materials, osmotic pumps (e.g., Alza minipumps), oral or suppositorial solid (tablet or pill) pharmaceutical formulations, and decanting or topical applications during surgery. For example, direct injection of naked calcium phosphate-precipitated plasmid into rat liver and rat spleen or a protein-coated plasmid into the portal vein has resulted in gene expression of the foreign gene in the rat livers (Kaneda et al., Science 243:375 (1989)).

[0560] A preferred method of local administration is by direct injection. Preferably, an albumin fusion protein of the present invention complexed with a delivery vehicle is administered by direct injection into or locally within the area of arteries. Administration of a composition locally within the area of arteries refers to injecting the composition centimeters and preferably, millimeters within arteries.

[0561] Another method of local administration is to contact a polynucleotide construct of the present invention in or around a surgical wound. For example, a patient can undergo surgery and the polynucleotide construct can be coated on the surface of tissue inside the wound or the construct can be injected into areas of tissue inside the wound.

[0562] Therapeutic compositions useful in systemic administration, include fusion proteins of the present invention complexed to a targeted delivery vehicle of the present invention. Suitable delivery vehicles for use with systemic administration comprise liposomes comprising ligands for targeting the vehicle to a particular site. In specific embodiments, suitable delivery vehicles for use with systemic administration comprise liposomes comprising albumin fusion proteins of the invention for targeting the vehicle to a particular site.

[0563] Preferred methods of systemic administration, include intravenous injection, aerosol, oral and percutaneous (topical) delivery. Intravenous injections can be performed using methods standard in the art. Aerosol delivery can also be performed using methods standard in the art (see, for example, Stribling et al., Proc. Natl. Acad. Sci. USA 189:11277-11281, 1992, which is incorporated herein by reference). Oral delivery can be performed by complexing a polynucleotide construct of the present invention to a carrier capable of withstanding degradation by digestive enzymes in the gut of an animal. Examples of such carriers, include plastic capsules or tablets, such as those known in the art. Topical delivery can be performed by mixing a polynucleotide construct of the present invention with a lipophilic reagent (e.g., DMSO) that is capable of passing into the skin.

[0564] Determining an effective amount of substance to be delivered can depend upon a number of factors including, for example, the chemical structure and biological activity of the substance, the age and weight of the animal, the precise condition requiring treatment and its severity, and the route of administration. The frequency of treatments depends upon a number of factors, such as the amount of polynucleotide constructs administered per dose, as well as the health and history of the subject. The precise amount, number of doses, and timing of doses will be determined by the attending physician or veterinarian.

[0565] Albumin fusion proteins of the present invention can be administered to any animal, preferably to mammals and birds. Preferred mammals include humans, dogs, cats, mice, rats, rabbits sheep, cattle, horses and pigs, with humans being particularly preferred.

[0566] Biological Activities

[0567] Albumin fusion proteins and/or polynucleotides encoding albumin fusion proteins of the present invention, can be used in assays to test for one or more biological activities. If an albumin fusion protein and/or polynucleotide exhibits an activity in a particular assay, it is likely that the Therapeutic protein corresponding to the fusion portein may be involved in the diseases associated with the biological activity. Thus, the fusion protein could be used to treat the associated disease.

[0568] Members of the secreted family of proteins are believed to be involved in biological activities associated with, for example, cellular signaling. Accordingly, albumin fusion proteins of the invention and polynucleotides encoding these protiens, may be used in diagnosis, prognosis, prevention and/or treatment of diseases and/or disorders associated with aberrant activity of secreted polypeptides.

[0569] In preferred embodiments, fusion proteins of the present invention may be used in the diagnosis, prognosis, prevention and/or treatment of diseases and/or disorders relating to diseases and disorders of the endocrine system, the nervous system (See, for example, “Neurological Disorders” section below), and the immune system (See, for example, “Immune Activity” section below), respiratory system (See, for example, “Respiratory Disorders” section below), cardiovascular system (See, for example, “Cardiovascular Disorders” section below), reproductive system (See, for example, “Reproductive System Disorders” section below) digestive system (See, for example, “Gastrointestinal Disorders” section below), diseases and/or disorders relating to cell proliferation (See, for example, “Hyperproliferative Disorders” section below), and/or diseases or disorders relating to the blood ((See, for example, “Blood-Related Disorders” section below).

[0570] In preferred embodiments, the present invention encompasses a method of treating a disease or disorder listed in the “Preferred Indication Y” column of Table 1 comprising administering to a patient in which such treatment, prevention or amelioration is desired an albumin fusion protein of the invention that comprises a Therapeutic protein portion corresponding to a Therapeutic protein disclosed in the “Therapeutic Protein X” column of Table 1 (in the same row as the disease or disorder to be treated is listed in the “Preferred Indication Y” column of Table 1) in an amount effective to treat, prevent or ameliorate the disease or disorder.

[0571] In certain embodiments, a Therapeutic protein having a “Cancer” recitation in the “Preferred Indication” column of Table 1, an albumin fusion protein that comprises a Therapeutic protein portion corresponding to a Therapeutic protein, and fragments and variants thereof, may be used to treat a disease and/or disorder relating to a neoplastic disease (e.g., leukemia, cancer, and/or as described below under “Hyperproliferative Disorders”).

[0572] In additional embodiments, a Therapeutic protein having a “Cancer” recitation in the “Preferred Indication” column of Table 1, an albumin fusion protein that comprises a Therapeutic protein portion corresponding to this Therapeutic protein, and fragments and variants thereof, may be used to treat a neoplasm located in a tissue selected from the group consisting of: colon, abdomen, bone, breast, digestive system, liver, pancreas, prostate, peritoneum, lung, blood (e.g., leukemia), endocrine glands (adrenal, parathyroid, pituitary, testicles, ovary, thymus, thyroid), uterus, eye, head and neck, nervous (central and peripheral), lymphatic system, pelvic, skin, soft tissue, spleen, thoracic, and urogenital.

[0573] In other embodiments, a Therapeutic protein having a “Cancer” recitation in the “Preferred Indication” column of Table 1, an albumin fusion protein that comprises a Therapeutic protein portion corresponding to this Therapeutic protein, and fragments and variants thereof, may be used to treat a pre-neoplastic condition, selected from the group consisting of: hyperplasia (e.g., endometrial hyperplasia and/or as described in the section entitled “Hyperproliferative Disorders”), metaplasia (e.g., connective tissue metaplasia, atypical metaplasia, and/or as described in the section entitled “Hyperproliferative Disorders”), and dysplasia (e.g., cervical dysplasia, and bronchopulmonary dysplasia).

[0574] In additional embodiments, a Therapeutic protein having a “Cancer” recitation in the “Preferred Indication” column of Table 1, an albumin fusion protein that comprises a Therapeutic protein portion corresponding to this Therapeutic protein, and fragments and variants thereof, may be used to treat a benign dysproliferative disorder selected from the group consisting of: benign tumors, fibrocystic conditions, tissue hypertrophy, and/or as described in the section entitled “Hyperproliferative Disorders”.

[0575] In certain embodiments, a Therapeutic protein having a “Immune/Hematopoietic” recitation in the “Preferred Indication” column of Table 1, an albumin fusion protein that comprises a Therapeutic protein portion corresponding to this Therapeutic protein, and fragments and variants thereof, may be used to treat a disease and/or disorder relating to a neoplastic disease (e.g., as described below under “Hyperproliferative Disorders”), a blood disorder (e.g., as described below under “Immune Activity”, “Cardiovascular Disorders” and/or “Blood-Related Disorders”), and/or an infection (e.g., as described below under “Infectious Disease”).

[0576] In additional embodiments, a Therapeutic protein having a “Immune/Hematopoietic” recitation in the “Preferred Indication” column of Table 1, an albumin fusion protein that comprises a Therapeutic protein portion corresponding to this Therapeutic protein, and fragments and variants thereof, may be used to treat a disease and/or disorder selected from the group consisting of: anemia, pancytopenia, leukopenia, thrombocytopenia, leukemias, Hodgkin's disease, non-Hodgkin's lymphoma, acute lymphocytic anemia (ALL), plasmacytomas, multiple myeloma, Burkitt's lymphoma, arthritis, asthma, AIDS, autoimmune disease, rheumatoid arthritis, granulomatous disease, immune deficiency, inflammatory bowel disease, sepsis, neutropenia, neutrophilia, psoriasis, an immune reaction to a transplanted organ and/or tissue, systemic lupus erythematosis, hemophilia, hypercoagulation, diabetes mellitus, endocarditis, meningitis, Lyme Disease, and allergies.

[0577] In other embodiments, a Therapeutic protein having a “Reproductive” recitation in the “Preferred Indication” column of Table 1, an albumin fusion protein that comprises a Therapeutic protein portion corresponding to this Therapeutic protein, and fragments and variants thereof, may be used to treat a disease and/or disorder relating to a neoplastic disease (e.g., as described below under “Hyperproliferative Disorders”), and/or a disorder of the reproductive system (e.g., as described below under “Reproductive System Disorders”).

[0578] In additional embodiments, a Therapeutic protein having a “Reproductive” recitation in the “Preferred Indication” column of Table 1, an albumin fusion protein that comprises a Therapeutic protein portion corresponding to this Therapeutic protein, and fragments and variants thereof, may be used to treat a disease and/or disorder selected from the group consisting of: cryptorchism, prostatitis, inguinal hernia, varicocele, a Leydig cell tumor, verrucous carcinoma, prostatitis, malacoplakia, Peyronie's disease, penile carcinoma, squamous cell hyperplasia, dysmenorrhea, ovarian adenocarcinoma, Turner's syndrome, mucopurulent cervicitis, a Sertoli-leydig tumor, ovarian cancer, uterine cancer, pelvic inflammatory disease, testicular cancer, prostate cancer, Klinefelter's syndrome, Young's syndrome, premature ejaculation, diabetes mellitus, cystic fibrosis, Kartagener's syndrome, testicular atrophy, testicular feminization, anorchia, ectopic testis, epididymitis, orchitis, gonorrhea, syphilis, testicular torsion, vasitis nodosa, a germ cell tumor, a stromal tumor, dysmenorrhea, retroverted uterus, endometriosis, fibroids, adenomyosis, anovulatory bleeding, amenorrhea, Cushing's syndrome, a hydatidiform mole, Asherman's syndrome, premature menopause, precocious puberty, uterine polyps, dysfunctional uterine bleeding, cervicitis, chronic cervicitis, mucopurulent cervicitis, cervical dysplasia, cervical polyps, Nabothian cysts, cervical erosion, cervical incompetence, a cervical neoplasm, pseudohermaphroditism, and premenstrual syndrome.

[0579] In other embodiments, a Therapeutic protein having a “Musculoskeletal” recitation in the “Preferred Indication” column of Table 1, an albumin fusion protein that comprises a Therapeutic protein portion corresponding to this Therapeutic protein, and fragments and variants thereof, may be used to treat a disease and/or disorder relating to a neoplastic disease (e.g., as described below under “Hyperproliferative Disorders”), and/or a disorder of the immune system (e.g., as described below under “Immune Activity”).

[0580] In further embodiments, a Therapeutic protein having a “Musculoskeletal” recitation in the “Preferred Indication” column of Table 1, an albumin fusion protein that comprises a Therapeutic protein portion corresponding to this Therapeutic protein, and fragments and variants thereof, may be used to treat a disease and/or disorder selected from the group consisting of: bone cancer (e.g., osteochondroma, benign chondroma, chondroblastoma, chondromyxoid fibroma, osteoid osteoma, giant cell tumor, multiple myeloma, and osteosarcoma), Paget's Disease, rheumatoid arthritis, systemic lupus erythematosus, osteomyelitis, Lyme Disease, gout, bursitis, tendonitis, osteoporosis, osteoarthritis, muscular dystrophy, mitochondrial myopathy, cachexia, and multiple sclerosis.

[0581] In other embodiments, a Therapeutic protein having a “Cardiovascular” recitation in the “Preferred Indication” column of Table 1, an albumin fusion protein that comprises a Therapeutic protein portion corresponding to this Therapeutic protein, and fragments and variants thereof, may be used to treat a disease and/or disorder relating to a neoplastic disease (e.g., as described below under “Hyperproliferative Disorders”), and/or a disorder of the cardiovascular system (e.g., as described below under “Cardiovascular Disorders”).

[0582] In additional embodiments, a Therapeutic protein having a “Cardiovascular” recitation in the “Preferred Indication” column of Table 1, an albumin fusion protein that comprises a Therapeutic protein portion corresponding to this Therapeutic protein, and fragments and variants thereof, may be used to treat a disease and/or disorder selected from the group consisting of: myxoma, fibroma, rhabdomyoma, cardiovascular abnormality (e.g., a congenital heart defect, cerebral arteriovenous malformation, septal defect), heart disease (e.g., heart failure, congestive heart disease, arrhythmia, tachycardia, fibrillation, pericardial Disease, endocarditis), cardiac arrest, heart valve disease (e.g., stenosis, regurgitation, prolapse), vascular disease (e.g., hypertension, coronary artery disease, angina, aneurysm, arteriosclerosis, peripheral vascular disease), hyponatremia, hypematremia, hypokalemia, and hyperkalemia.

[0583] In other embodiments, a Therapeutic protein having a “Mixed Fetal” recitation in the “Preferred Indication” column of Table 1, an albumin fusion protein that comprises a Therapeutic protein portion corresponding to this Therapeutic protein, and fragments and variants thereof, may be used to treat a disease and/or disorder relating to a neoplastic disease (e.g., as described below under “Hyperproliferative Disorders”).

[0584] In further embodiments, a Therapeutic protein having a “Mixed Fetal” recitation in the “Preferred Indication” column of Table 1, an albumin fusion protein that comprises a Therapeutic protein portion corresponding to this Therapeutic protein, and fragments and variants thereof, may be used to treat a disease and/or disorder selected from the group consisting of: spina bifida, hydranencephaly, neurofibromatosis, fetal alcohol syndrome, diabetes mellitus, PKU, Down's syndrome, Patau syndrome, Edwards syndrome, Turner syndrome, Apert syndrome, Carpenter syndrome, Conradi syndrome, Crouzon syndrome, cutis laxa, Cornelia de Lange syndrome, Ellis-van Creveld syndrome, Holt-Oram syndrome, Kartagener syndrome, Meckel-Gruber syndrome, Noonan syndrome, Pallister-Hall syndrome, Rubinstein-Taybi syndrome, Scimitar syndrome, Smith-Lemli-Opitz syndrome, thromocytopenia-absent radius (TAR) syndrome, Treacher Collins syndrome, Williams syndrome, Hirschsprung's disease, Meckel's diverticulum, polycystic kidney disease, Turner's syndrome, and gonadal dysgenesis, Klippel-Feil syndrome, Ostogenesis imperfecta, muscular dystrophy, Tay-Sachs disease, Wilm's tumor, neuroblastoma, and retinoblastoma.

[0585] In further embodiments, a Therapeutic protein having a “Excretory” recitation in the “Preferred Indication” column of Table 1, an albumin fusion protein that comprises a Therapeutic protein portion corresponding to this Therapeutic protein, and fragments and variants thereof, may be used to treat a disease and/or disorder relating to a neoplastic disease (e.g., as described below under “Hyperproliferative Disorders”) and/or a renal disorder (e.g., as described below under “Renal Disorders”).

[0586] In other embodiments, a Therapeutic protein having a “Excretory” recitation in the “Preferred Indication” column of Table 1, an albumin fusion protein that comprises a Therapeutic protein portion corresponding to this Therapeutic protein, and fragments and variants thereof, may be used to treat a disease and/or disorder selected from the group consisting of: bladder cancer, prostate cancer, benign prostatic hyperplasia, bladder disorders (e.g., urinary incontinence, urinary retention, urinary obstruction, urinary tract Infections, interstitial cystitis, prostatitis, neurogenic bladder, hematuria), a renal disorder (e.g., hydronephrosis, proteinuria, renal failure, pyelonephritis, urolithiasis, reflux nephropathy, and unilateral obstructive uropathy).

[0587] In further embodiments, a Therapeutic protein having a “Neural/Sensory” recitation in the “Preferred Indication” column of Table 1, an albumin fusion protein that comprises a Therapeutic protein portion corresponding to this Therapeutic protein, and fragments and variants thereof, may be used to treat a disease and/or disorder relating to a neoplastic disease (e.g., as described below under “Hyperproliferative Disorders”) and/or a disease or disorder of the nervous system (e.g., as described below under “Neural Activity and Neurological Diseases”).

[0588] In other embodiments, a Therapeutic protein having a “Neural/Sensory” recitation in the “Preferred Indication” column of Table 1, an albumin fusion protein that comprises a Therapeutic protein portion corresponding to this Therapeutic protein, and fragments and variants thereof, may be used to treat a disease and/or disorder selected from the group consisting of: brain cancer (e.g, brain stem glioma, brain tumor, central nervous system (Primary) lymphoma, central nervous system lymphoma, cerebellar astrocytoma, and cerebral astrocytoma, a neurodegenerative disorder (e.g., Alzheimer's Disease, Creutzfeldt-Jakob Disease, Parkinson's Disease, and Idiopathic Presenile Dementia), encephalomyelitis, cerebral malaria, meningitis, a metabolic brain disease (e.g., phenylketonuria and pyruvate carboxylase deficiency), cerebellar ataxia, ataxia telangiectasia, and AIDS Dementia Complex, schizophrenia, attention deficit disorder, hyperactive attention deficit disorder, autism, and an obsessive compulsive disorder.

[0589] In other embodiments, a Therapeutic protein having a “Respiratory” recitation in the “Preferred Indication” column of Table 1, an albumin fusion protein that comprises a Therapeutic protein portion corresponding to this Therapeutic protein, and fragments and variants thereof, may be used to treat a disease and/or disorder relating to a neoplastic disease (e.g., as described below under “Hyperproliferative Disorders”) and/or a disease or disorder of the respiratory system (e.g., as described below under “Respiratory Disorders”).

[0590] In other embodiments, a Therapeutic protein having a “Respiratory” recitation in the “Preferred Indication” column of Table 1, an albumin fusion protein that comprises a Therapeutic protein portion corresponding to this Therapeutic protein, and fragments and variants thereof, may be used to treat a disease and/or disorder selected from the group consisting of: a cancer of the respiratory system (such as larynx cancer, pharynx cancer, trachea cancer, epiglottis cancer, lung cancer, squamous cell carcinoma, small cell (oat cell) carcinoma, large cell carcinoma, and adenocarcinoma), an allergic reaction, cystic fibrosis, sarcoidosis, histiocytosis X, an infiltrative lung disease (e.g., pulmonary fibrosis and lymphoid interstitial pneumonia), an obstructive airway disease (e.g., asthma, emphysema, chronic or acute bronchitis), an occupational lung disease (e.g., silicosis and asbestosis), pneumonia, and pleurisy.

[0591] In other embodiments, a Therapeutic protein having an “Endocrine” recitation in the “Preferred Indication” column of Table 1, an albumin fusion protein that comprises a Therapeutic protein portion corresponding to this Therapeutic protein, and fragments and variants thereof, may be used to treat a disease and/or disorder relating to a neoplastic disease (e.g., as described below under “Hyperproliferative Disorders”), a disease or disorder of the respiratory system (e.g., as described below under “Respiratory Disorders”), a renal disorder (e.g., as described below under “Renal Disorders”), and/or a disorder of the endocrine system (e.g., as described below under “Endocrine Disorders”).

[0592] In other embodiments, a Therapeutic protein having a “Endocrine” recitation in the “Preferred Indication” column of Table 1, an albumin fusion protein that comprises a Therapeutic protein portion corresponding to this Therapeutic protein, and fragments and variants thereof, may be used to treat a disease and/or disorder selected from the group consisting of: a cancer of endocrine tissues and/or organs (e.g., cancer of the hypothalamus, pituitary gland, thyroid gland, parathyroid glands, pancreas, adrenal glands, ovaries, and testes), diabetes (e.g., diabetes insipidus, type I and type II diabetes mellitus), obesity, a disorder related to pituitary glands (e.g., hyperpituitarism, hypopituitarism, and pituitary dwarfism), hypothyroidism, hyperthyroidism, goiter, reproductive disorders (e.g. male and female infertility), a disorder related to adrenal glands (e.g., Addison's Disease, corticosteroid deficiency, and Cushing's Syndrome), kidney cancer (e.g., hypernephroma, transitional cell cancer, and Wilm's tumor), diabetic nephropathy, interstitial nephritis, polycystic kidney disease, glomerulonephritis (e.g., IgM mesangial proliferative glomerulonephritis and glomerulonephritis caused by an autoimmune disorder; such as Goodpasture's syndrome), and nephrocalcinosis.

[0593] In additional embodiments, a Therapeutic protein having a “Digestive” recitation in the “Preferred Indication” column of Table 1, an albumin fusion protein that comprises a Therapeutic protein portion corresponding to this Therapeutic protein, and fragments and variants thereof, may be used to treat a disease and/or disorder relating to, for example, a neoplastic disease (e.g., as described below under “Hyperproliferative Disorders”) and/or a disease or disorder of the gastrointestinal system (e.g., as described below under “Gastrointestinal Disorders”).

[0594] In other embodiments, a Therapeutic protein having a “Digestive” recitation in the “Preferred Indication” column of Table 1, an albumin fusion protein that comprises a Therapeutic protein portion corresponding to this Therapeutic protein, and fragments and variants thereof, may be used to treat a disease and/or disorder selected from the group consisting of: ulcerative colitis, appendicitis, Crohn's disease, hepatitis, hepatic encephalopathy, portal hypertension, cholelithiasis, cancer of the digestive system (e.g., biliary tract cancer, stomach cancer, colon cancer, gastric cancer, pancreatic cancer, cancer of the bile duct, a tumor of the colon (e.g., polyps or cancers), and cirrhosis), pancreatitis, ulcerative disease, pyloric stenosis, gastroenteritis, gastritis, gastric atropy, a benign tumor of the duodenum, distension, irritable bowel syndrome, malabsorption, a congenital disorder of the small intestine, bacterial and parasitic infection, megacolon, Hirschsprung's disease, aganglionic megacolon, acquired megacolon, colitis, a anorectal disorder (e.g., anal fistulas, hemorrhoids), a congenital disorder of the liver (e.g., Wilson's disease, hemochromatosis, cystic fibrosis, biliary atresia, and alpha1-antitrypsin deficiency), portal hypertension, cholelithiasis, and jaundice.

[0595] In further embodiments, a Therapeutic protein having a “Connective/Epithelial” recitation in the “Preferred Indication” column of Table 1, an albumin fusion protein that comprises a Therapeutic protein portion corresponding to this Therapeutic protein, and fragments and variants thereof, may be used to treat a disease and/or disorder relating to a neoplastic disease (e.g., as described below under “Hyperproliferative Disorders”), a cellular and/or genetic abnormality (e.g., as described below under “Diseases at the Cellular Level”), angiogenesis (e.g., as described below under “Anti-Angiogenesis Activity”), and/or to promote or inhibit regeneration (e.g., as described below under “Regeneration”), and/or wound healing (e.g., as described below under “Wound Healing and Epithelial Cell Proliferation”).

[0596] In certain embodiments, a Therapeutic protein having a “Connective/Epithelial” recitation in the “Preferred Indication” column of Table 1, an albumin fusion protein that comprises a Therapeutic protein portion corresponding to this Therapeutic protein, and fragments and variants thereof, may be used to treat a disease and/or disorder selected from the group consisting of: connective tissue metaplasia, mixed connective tissue disease, focal epithelial hyperplasia, epithelial metaplasia, mucoepithelial dysplasia, graft v. host disease, polymyositis, cystic hyperplasia, cerebral dysplasia, tissue hypertrophy, Alzheimer's disease, lymphoproliferative disorder, Waldenstron's macroglobulinemia, Crohn's disease, pernicious anemia, idiopathic Addison's disease, glomerulonephritis, bullous pemphigoid, Sjogren's syndrome, diabetes mellitus, cystic fibrosis, osteoblastoma, osteoclastoma, osteosarcoma, chondrosarcoma, osteoporosis, osteocarthritis, periodontal disease, wound healing, relapsing polychondritis, vasculitis, polyarteritis nodosa, Wegener's granulomatosis, cellulitis, rheumatoid arthritis, psoriatic arthritis, discoid lupus erythematosus, systemic lupus erythematosus, scleroderma, CREST syndrome, Sjogren's syndrome, polymyositis, dermatomyositis, mixed connective tissue disease, relapsing polychondritis, vasculitis, Henoch-Schonlein syndrome, erythema nodosum, polyarteritis nodosa, temporal (giant cell) arteritis, Takayasu's arteritis, Wegener's granulomatosis, Reiter's syndrome, Behcet's syndrome, ankylosing spondylitis, cellulitis, keloids, Ehler Danlos syndrome, Marfan syndrome, pseudoxantoma elasticum, osteogenese imperfecta, chondrodysplasias, epidermolysis bullosa, Alport syndrome, and cutis laxa.

[0597] In certain embodiments, an albumin fusion protein of the present invention may be used to diagnose and/or prognose diseases and/or disorders associated with the tissue(s) in which the gene corresponding to the Therapeutic protein portion of the fusion portien of the invention is expressed.

[0598] Thus, fusion proteins of the invention and polynucleotides encoding albumin fusion proteins of the invention are useful in the diagnosis, detection and/or treatment of diseases and/or disorders associated with activities that include, but are not limited to, prohormone activation, neurotransmitter activity, cellular signaling, cellular proliferation, cellular differentiation, and cell migration.

[0599] More generally, fusion proteins of the invention and polynucleotides encoding albumin fusion proteins of the invention may be useful for the diagnosis, prognosis, prevention and/or treatment of diseases and/or disorders associated with the following systems.

[0600] Immune Activity

[0601] Albumin fusion proteins of the invention and polynucleotides encoding albumin fusion proteins of the invention may be useful in treating, preventing, diagnosing and/or prognosing diseases, disorders, and/or conditions of the immune system, by, for example, activating or inhibiting the proliferation, differentiation, or mobilization (chemotaxis) of immune cells. Immune cells develop through a process called hematopoiesis, producing myeloid (platelets, red blood cells, neutrophils, and macrophages) and lymphoid (B and T lymphocytes) cells from pluripotent stem cells. The etiology of these immune diseases, disorders, and/or conditions may be genetic, somatic, such as cancer and some autoimmune diseases, acquired (e.g., by chemotherapy or toxins), or infectious. Moreover, fusion proteins of the invention and/or polynucleotides encoding albumin fusion proteins of the invention can be used as a marker or detector of a particular immune system disease or disorder.

[0602] In another embodiment, a fusion protein of the invention and/or polynucleotide encoding an albumin fusion protein of the invention, may be used to treat diseases and disorders of the immune system and/or to inhibit or enhance an immune response generated by cells associated with the tissue(s) in which the polypeptide of the invention is expressed.

[0603] Albumin fusion proteins of the invention and/or polynucleotides encoding albumin fusion proteins of the invention may be useful in treating, preventing, diagnosing, and/or prognosing immunodeficiencies, including both congenital and acquired immunodeficiencies. Examples of B cell immunodeficiencies in which immunoglobulin levels B cell function and/or B cell numbers are decreased include: X-linked agammaglobulinemia (Bruton's disease), X-linked infantile agammaglobulinemia, X-linked immunodeficiency with hyper IgM, non X-linked immunodeficiency with hyper IgM, X-linked lymphoproliferative syndrome (XLP), agammaglobulinemia including congenital and acquired agammaglobulinemia, adult onset agammaglobulinemia, late-onset agammaglobulinemia, dysgammaglobulinemia, hypogammaglobulinemia, unspecified hypogammaglobulinemia, recessive agammaglobulinemia (Swiss type), Selective IgM deficiency, selective IgA deficiency, selective IgG subclass deficiencies, IgG subclass deficiency (with or without IgA deficiency), Ig deficiency with increased IgM, IgG and IgA deficiency with increased IgM, antibody deficiency with normal or elevated Igs, Ig heavy chain deletions, kappa chain deficiency, B cell lymphoproliferative disorder (BLPD), common variable immunodeficiency (CVID), common variable immunodeficiency (CVI) (acquired), and transient hypogammaglobulinemia of infancy.

[0604] In specific embodiments, ataxia-telangiectasia or conditions associated with ataxia-telangiectasia are treated, prevented, diagnosed, and/or prognosing using the, fusion proteins of the invention and/or polynucleotides encoding albumin fusion proteins of the invention.

[0605] Examples of congenital immunodeficiencies in which T cell and/or B cell function and/or number is decreased include, but are not limited to: DiGeorge anomaly, severe combined immunodeficiencies (SCID) (including, but not limited to, X-linked SCID, autosomal recessive SCID, adenosine deaminase deficiency, purine nucleoside phosphorylase (PNP) deficiency, Class II MHC deficiency (Bare lymphocyte syndrome), Wiskott-Aldrich syndrome, and ataxia telangiectasia), thymic hypoplasia, third and fourth pharyngeal pouch syndrome, 22q11.2 deletion, chronic mucocutaneous candidiasis, natural killer cell deficiency (NK), idiopathic CD4+ T-lymphocytopenia, immunodeficiency with predominant T cell defect (unspecified), and unspecified immunodeficiency of cell mediated immunity.

[0606] In specific embodiments, DiGeorge anomaly or conditions associated with DiGeorge anomaly are treated, prevented, diagnosed, and/or prognosed using fusion proteins of the invention and/or polynucleotides encoding albumin fusion proteins of the invention.

[0607] Other immunodeficiencies that may be treated, prevented, diagnosed, and/or prognosed using fusion proteins of the invention and/or polynucleotides encoding albumin fusion proteins of the invention, include, but are not limited to, chronic granulomatous disease, Chédiak-Higashi syndrome, myeloperoxidase deficiency, leukocyte glucose-6-phosphate dehydrogenase deficiency, X-linked lymphoproliferative syndrome (XLP), leukocyte adhesion deficiency, complement component deficiencies (including C1, C2, C3, C4, C5, C6, C7, C8 and/or C9 deficiencies), reticular dysgenesis, thymic alymphoplasia-aplasia, immunodeficiency with thymoma, severe congenital leukopenia, dysplasia with immunodeficiency, neonatal neutropenia, short limbed dwarfism, and Nezelof syndrome-combined immunodeficiency with Igs.

[0608] In a preferred embodiment, the immunodeficiencies and/or conditions associated with the immunodeficiencies recited above are treated, prevented, diagnosed and/or prognosed using fusion proteins of the invention and/or polynucleotides encoding albumin fusion proteins of the invention.

[0609] In a preferred embodiment fusion proteins of the invention and/or polynucleotides encoding albumin fusion proteins of the invention could be used as an agent to boost immunoresponsiveness among immunodeficient individuals. In specific embodiments, fusion proteins of the invention and/or polynucleotides encoding albumin fusion proteins of the invention could be used as an agent to boost immunoresponsiveness among B cell and/or T cell immunodeficient individuals.

[0610] The albumin fusion proteins of the invention and/or polynucleotides encoding albumin fusion proteins of the invention may be useful in treating, preventing, diagnosing and/or prognosing autoimmune disorders. Many autoimmune disorders result from inappropriate recognition of self as foreign material by immune cells. This inappropriate recognition results in an immune response leading to the destruction of the host tissue. Therefore, the administration of fusion proteins of the invention and/or polynucleotides encoding albumin fusion proteins of the invention that can inhibit an immune response, particularly the proliferation, differentiation, or chemotaxis of T-cells, may be an effective therapy in preventing autoimmune disorders.

[0611] Autoimmune diseases or disorders that may be treated, prevented, diagnosed and/or prognosed by fusion proteins of the invention and/or polynucleotides encoding albumin fusion proteins of the invention include, but are not limited to, one or more of the following: systemic lupus erythematosus, rheumatoid arthritis, ankylosing spondylitis, multiple sclerosis, autoimmune thyroiditis, Hashimoto's thyroiditis, autoimmune hemolytic anemia, hemolytic anemia, thrombocytopenia, autoimmune thrombocytopenia purpura, autoimmune neonatal thrombocytopenia, idiopathic thrombocytopenia purpura, purpura (e.g., Henloch-Scoenlein purpura), autoimmunocytopenia, Goodpasture's syndrome, Pemphigus vulgaris, myasthenia gravis, Grave's disease (hyperthyroidism), and insulin-resistant diabetes mellitus.

[0612] Additional disorders that are likely to have an autoimmune component that may be treated, prevented, and/or diagnosed with the albumin fusion proteins of the invention and/or polynucleotides encoding albumin fusion proteins of the invention include, but are not limited to, type II collagen-induced arthritis, antiphospholipid syndrome, dermatitis, allergic encephalomyelitis, myocarditis, relapsing polychondritis, rheumatic heart disease, neuritis, uveitis ophthalmia, polyendocrinopathies, Reiter's Disease, Stiff-Man Syndrome, autoimmune pulmonary inflammation, autism, Guillain-Barre Syndrome, insulin dependent diabetes mellitus, and autoimmune inflammatory eye disorders.

[0613] Additional disorders that are likely to have an autoimmune component that may be treated, prevented, diagnosed and/or prognosed with the albumin fusion proteins of the invention and/or polynucleotides encoding albumin fusion proteins of the invention include, but are not limited to, scleroderma with anti-collagen antibodies (often characterized, e.g., by nucleolar and other nuclear antibodies), mixed connective tissue disease (often characterized, e.g., by antibodies to extractable nuclear antigens (e.g., ribonucleoprotein)), polymyositis (often characterized, e.g., by nonhistone ANA), pernicious anemia (often characterized, e.g., by antiparietal cell, microsomes, and intrinsic factor antibodies), idiopathic Addison's disease (often characterized, e.g., by humoral and cell-mediated adrenal cytotoxicity, infertility (often characterized, e.g., by antispermatozoal antibodies), glomerulonephritis (often characterized, e.g., by glomerular basement membrane antibodies or immune complexes), bullous pemphigoid (often characterized, e.g., by IgG and complement in basement membrane), Sjogren's syndrome (often characterized, e.g., by multiple tissue antibodies, and/or a specific nonhistone ANA (SS-B)), diabetes mellitus (often characterized, e.g., by cell-mediated and humoral islet cell antibodies), and adrenergic drug resistance (including adrenergic drug resistance with asthma or cystic fibrosis) (often characterized, e.g., by beta-adrenergic receptor antibodies).

[0614] Additional disorders that may have an autoimmune component that may be treated, prevented, diagnosed and/or prognosed with the albumin fusion proteins of the invention and/or polynucleotides encoding albumin fusion proteins of the invention include, but are not limited to, chronic active hepatitis (often characterized, e.g., by smooth muscle antibodies), primary biliary cirrhosis (often characterized, e.g., by mitochondria antibodies), other endocrine gland failure (often characterized, e.g., by specific tissue antibodies in some cases), vitiligo (often characterized, e.g., by melanocyte antibodies), vasculitis (often characterized, e.g., by Ig and complement in vessel walls and/or low serum complement), post-MI (often characterized, e.g., by myocardial antibodies), cardiotomy syndrome (often characterized, e.g., by myocardial antibodies), urticaria (often characterized, e.g., by IgG and IgM antibodies to IgE), atopic dermatitis (often characterized, e.g., by IgG and IgM antibodies to IgE), asthma (often characterized, e.g., by IgG and IgM antibodies to IgE), and many other inflammatory, granulomatous, degenerative, and atrophic disorders.

[0615] In a preferred embodiment, the autoimmune diseases and disorders and/or conditions associated with the diseases and disorders recited above are treated, prevented, diagnosed and/or prognosed using for example, fusion proteins of the invention and/or polynucleotides encoding albumin fusion proteins of the invention. In a specific preferred embodiment, rheumatoid arthritis is treated, prevented, and/or diagnosed using fusion proteins of the invention and/or polynucleotides encoding albumin fusion proteins of the invention.

[0616] In another specific preferred embodiment, systemic lupus erythematosus is treated, prevented, and/or diagnosed using fusion proteins of the invention and/or polynucleotides encoding albumin fusion proteins of the invention. In another specific preferred embodiment, idiopathic thrombocytopenia purpura is treated, prevented, and/or diagnosed using fusion proteins of the invention and/or polynucleotides encoding albumin fusion proteins of the invention.

[0617] In another specific preferred embodiment IgA nephropathy is treated, prevented, and/or diagnosed using fusion proteins of the invention and/or polynucleotides encoding albumin fusion proteins of the invention.

[0618] In a preferred embodiment, the autoimmune diseases and disorders and/or conditions associated with the diseases and disorders recited above are treated, prevented, diagnosed and/or prognosed using fusion proteins of the invention and/or polynucleotides encoding albumin fusion proteins of the invention.

[0619] In preferred embodiments, fusion proteins of the invention and/or polynucleotides encoding albumin fusion proteins of the invention are used as a immunosuppressive agent(s).

[0620] Albumin fusion proteins of the invention and/or polynucleotides encoding albumin fusion proteins of the invention may be useful in treating, preventing, prognosing, and/or diagnosing diseases, disorders, and/or conditions of hematopoietic cells. Albumin fusion proteins of the invention and/or polynucleotides encoding albumin fusion proteins of the invention could be used to increase differentiation and proliferation of hematopoietic cells, including the pluripotent stem cells, in an effort to treat or prevent those diseases, disorders, and/or conditions associated with a decrease in certain (or many) types hematopoietic cells, including but not limited to, leukopenia, neutropenia, anemia, and thrombocytopenia. Alternatively, fusion proteins of the invention and/or polynucleotides encoding albumin fusion proteins of the invention could be used to increase differentiation and proliferation of hematopoietic cells, including the pluripotent stem cells, in an effort to treat or prevent those diseases, disorders, and/or conditions associated with an increase in certain (or many) types of hematopoietic cells, including but not limited to, histiocytosis.

[0621] Allergic reactions and conditions, such as asthma (particularly allergic asthma) or other respiratory problems, may also be treated, prevented, diagnosed and/or prognosed using fusion proteins of the invention and/or polynucleotides encoding albumin fusion proteins of the invention. Moreover, these molecules can be used to treat, prevent, prognose, and/or diagnose anaphylaxis, hypersensitivity to an antigenic molecule, or blood group incompatibility.

[0622] Additionally, fusion proteins of the invention and/or polynucleotides encoding albumin fusion proteins of the invention, may be used to treat, prevent, diagnose and/or prognose IgE-mediated allergic reactions. Such allergic reactions include, but are not limited to, asthma, rhinitis, and eczema. In specific embodiments, fusion proteins of the invention and/or polynucleotides encoding albumin fusion proteins of the invention may be used to modulate IgE concentrations in vitro or in vivo.

[0623] Moreover, fusion proteins of the invention and/or polynucleotides encoding albumin fusion proteins of the invention have uses in the diagnosis, prognosis, prevention, and/or treatment of inflammatory conditions. For example, since fusion proteins of the invention and/or polynucleotides encoding albumin fusion proteins of the invention may inhibit the activation, proliferation and/or differentiation of cells involved in an inflammatory response, these molecules can be used to prevent and/or treat chronic and acute inflammatory conditions. Such inflammatory conditions include, but are not limited to, for example, inflammation associated with infection (e.g., septic shock, sepsis, or systemic inflammatory response syndrome), ischemia-reperfusion injury, endotoxin lethality, complement-mediated hyperacute rejection, nephritis, cytokine or chemokine induced lung injury, inflammatory bowel disease, Crohn's disease, over production of cytokines (e.g., TNF or IL-1), respiratory disorders (e.g., asthma and allergy); gastrointestinal disorders (e.g., inflammatory bowel disease); cancers (e.g., gastric, ovarian, lung, bladder, liver, and breast); CNS disorders (e.g., multiple sclerosis; ischemic brain injury and/or stroke, traumatic brain injury, neurodegenerative disorders (e.g., Parkinson's disease and Alzheimer's disease); AIDS-related dementia; and prion disease); cardiovascular disorders (e.g., atherosclerosis, myocarditis, cardiovascular disease, and cardiopulmonary bypass complications); as well as many additional diseases, conditions, and disorders that are characterized by inflammation (e.g., hepatitis, rheumatoid arthritis, gout, trauma, pancreatitis, sarcoidosis, dermatitis, renal ischemia-reperfusion injury, Grave's disease, systemic lupus erythematosus, diabetes mellitus, and allogenic transplant rejection).

[0624] Because inflammation is a fundamental defense mechanism, inflammatory disorders can effect virtually any tissue of the body. Accordingly, fusion proteins of the invention and/or polynucleotides encoding albumin fusion proteins of the invention, have uses in the treatment of tissue-specific inflammatory disorders, including, but not limited to, adrenalitis, alveolitis, angiocholecystitis, appendicitis, balanitis, blepharitis, bronchitis, bursitis, carditis, cellulitis, cervicitis, cholecystitis, chorditis, cochlitis, colitis, conjunctivitis, cystitis, dermatitis, diverticulitis, encephalitis, endocarditis, esophagitis, eustachitis, fibrositis, folliculitis, gastritis, gastroenteritis, gingivitis, glossitis, hepatosplenitis, keratitis, labyrinthitis, laryngitis, lymphangitis, mastitis, media otitis, meningitis, metritis, mucitis, myocarditis, myosititis, myringitis, nephritis, neuritis, orchitis, osteochondritis, otitis, pericarditis, peritendonitis, peritonitis, pharyngitis, phlebitis, poliomyelitis, prostatitis, pulpitis, retinitis, rhinitis, salpingitis, scleritis, sclerochoroiditis, scrotitis, sinusitis, spondylitis, steatitis, stomatitis, synovitis, syringitis, tendonitis, tonsillitis, urethritis, and vaginitis.

[0625] In specific embodiments, fusion proteins of the invention and/or polynucleotides encoding albumin fusion proteins of the invention, are useful to diagnose, prognose, prevent, and/or treat organ transplant rejections and graft-versus-host disease. Organ rejection occurs by host immune cell destruction of the transplanted tissue through an immune response. Similarly, an immune response is also involved in GVHD, but, in this case, the foreign transplanted immune cells destroy the host tissues. Polypeptides, antibodies, or polynucleotides of the invention, and/or agonists or antagonists thereof, that inhibit an immune response, particularly the activation, proliferation, differentiation, or chemotaxis of T-cells, may be an effective therapy in preventing organ rejection or GVHD. In specific embodiments, fusion proteins of the invention and/or polynucleotides encoding albumin fusion proteins of the invention, that inhibit an immune response, particularly the activation, proliferation, differentiation, or chemotaxis of T-cells, may be an effective therapy in preventing experimental allergic and hyperacute xenograft rejection.

[0626] In other embodiments, fusion proteins of the invention and/or polynucleotides encoding albumin fusion proteins of the invention, are useful to diagnose, prognose, prevent, and/or treat immune complex diseases, including, but not limited to, serum sickness, post streptococcal glomerulonephritis, polyarteritis nodosa, and immune complex-induced vasculitis.

[0627] Albumin fusion proteins of the invention and/or polynucleotides encoding albumin fusion proteins of the invention can be used to treat, detect, and/or prevent infectious agents. For example, by increasing the immune response, particularly increasing the proliferation activation and/or differentiation of B and/or T cells, infectious diseases may be treated, detected, and/or prevented. The immune response may be increased by either enhancing an existing immune response, or by initiating a new immune response. Alternatively, fusion proteins of the invention and/or polynucleotides encoding albumin fusion proteins of the invention may also directly inhibit the infectious agent (refer to section of application listing infectious agents, etc), without necessarily eliciting an immune response.

[0628] In another embodiment, albumin fusion proteins of the invention and/or polynucleotides encoding albumin fusion proteins of the invention are used as a vaccine adjuvant that enhances immune responsiveness to an antigen. In a specific embodiment, albumin fusion proteins of the invention and/or polynucleotides encoding albumin fusion proteins of the invention are used as an adjuvant to enhance tumor-specific immune responses.

[0629] In another specific embodiment, albumin fusion proteins of the invention and/or polynucleotides encoding albumin fusion proteins of the invention are used as an adjuvant to enhance anti-viral immune responses. Anti-viral immune responses that may be enhanced using the compositions of the invention as an adjuvant, include virus and virus associated diseases or symptoms described herein or otherwise known in the art. In specific embodiments, the compositions of the invention are used as an adjuvant to enhance an immune response to a virus, disease, or symptom selected from the group consisting of: AIDS, meningitis, Dengue, EBV, and hepatitis (e.g., hepatitis B). In another specific embodiment, the compositions of the invention are used as an adjuvant to enhance an immune response to a virus, disease, or symptom selected from the group consisting of: HIV/AIDS, respiratory syncytial virus, Dengue, rotavirus, Japanese B encephalitis, influenza A and B, parainfluenza, measles, cytomegalovirus, rabies, Junin, Chikungunya, Rift Valley Fever, herpes simplex, and yellow fever.

[0630] In another specific embodiment, albumin fusion proteins of the invention and/or polynucleotides encoding albumin fusion proteins of the invention are used as an adjuvant to enhance anti-bacterial or anti-fungal immune responses. Anti-bacterial or anti-fungal immune responses that may be enhanced using the compositions of the invention as an adjuvant, include bacteria or fungus and bacteria or fungus associated diseases or symptoms described herein or otherwise known in the art. In specific embodiments, the compositions of the invention are used as an adjuvant to enhance an immune response to a bacteria or fungus, disease, or symptom selected from the group consisting of: tetanus, Diphtheria, botulism, and meningitis type B.

[0631] In another specific embodiment, the compositions of the invention are used as an adjuvant to enhance an immune response to a bacteria or fungus, disease, or symptom selected from the group consisting of: Vibrio cholerae, Mycobacterium leprae, Salmonella typhi, Salmonella paratyphi, Meisseria meningitidis, Streptococcus pneumoniae, Group B streptococcus, Shigella spp., Enterotoxigenic Escherichia coli, Enterohemorrhagic E. coli, and Borrelia burgdorferi.

[0632] In another specific embodiment, albumin fusion proteins of the invention and/or polynucleotides encoding albumin fusion proteins of the invention are used as an adjuvant to enhance anti-parasitic immune responses. Anti-parasitic immune responses that may be enhanced using the compositions of the invention as an adjuvant, include parasite and parasite associated diseases or symptoms described herein or otherwise known in the art. In specific embodiments, the compositions of the invention are used as an adjuvant to enhance an immune response to a parasite. In another specific embodiment, the compositions of the invention are used as an adjuvant to enhance an immune response to Plasmodium (malaria) or Leishmania.

[0633] In another specific embodiment, albumin fusion proteins of the invention and/or polynucleotides encoding albumin fusion proteins of the invention may also be employed to treat infectious diseases including silicosis, sarcoidosis, and idiopathic pulmonary fibrosis; for example, by preventing the recruitment and activation of mononuclear phagocytes.

[0634] In another specific embodiment, albumin fusion proteins of the invention and/or polynucleotides encoding albumin fusion proteins of the invention are used as an antigen for the generation of antibodies to inhibit or enhance immune mediated responses against polypeptides of the invention.

[0635] In one embodiment, albumin fusion proteins of the invention and/or polynucleotides encoding albumin fusion proteins of the invention are administered to an animal (e.g., mouse, rat, rabbit, hamster, guinea pig, pigs, micro-pig, chicken, camel, goat, horse, cow, sheep, dog, cat, non-human primate, and human, most preferably human) to boost the immune system to produce increased quantities of one or more antibodies (e.g., IgG, IgA, IgM, and IgE), to induce higher affinity antibody production and immunoglobulin class switching (e.g., IgG, IgA, IgM, and IgE), and/or to increase an immune response.

[0636] In another specific embodiment, albumin fusion proteins of the invention and/or polynucleotides encoding albumin fusion proteins of the invention are used as a stimulator of B cell responsiveness to pathogens.

[0637] In another specific embodiment, albumin fusion proteins of the invention and/or polynucleotides encoding albumin fusion proteins of the invention are used as an activator of T cells.

[0638] In another specific embodiment, albumin fusion proteins of the invention and/or polynucleotides encoding albumin fusion proteins of the invention are used as an agent that elevates the immune status of an individual prior to their receipt of immunosuppressive therapies.

[0639] In another specific embodiment, albumin fusion proteins of the invention and/or polynucleotides encoding albumin fusion proteins of the invention are used as an agent to induce higher affinity antibodies.

[0640] In another specific embodiment, albumin fusion proteins of the invention and/or polynucleotides encoding albumin fusion proteins of the invention are used as an agent to increase serum immunoglobulin concentrations.

[0641] In another specific embodiment, albumin fusion proteins of the invention and/or polynucleotides encoding albumin fusion proteins of the invention are used as an agent to accelerate recovery of immunocompromised individuals.

[0642] In another specific embodiment, albumin fusion proteins of the invention and/or polynucleotides encoding albumin fusion proteins of the invention are used as an agent to boost immunoresponsiveness among aged populations and/or neonates.

[0643] In another specific embodiment, albumin fusion proteins of the invention and/or polynucleotides encoding albumin fusion proteins of the invention are used as an immune system enhancer prior to, during, or after bone marrow transplant and/or other transplants (e.g., allogeneic or xenogeneic organ transplantation). With respect to transplantation, compositions of the invention may be administered prior to, concomitant with, and/or after transplantation. In a specific embodiment, compositions of the invention are administered after transplantation, prior to the beginning of recovery of T-cell populations. In another specific embodiment, compositions of the invention are first administered after transplantation after the beginning of recovery of T cell populations, but prior to full recovery of B cell populations.

[0644] In another specific embodiment, albumin fusion proteins of the invention and/or polynucleotides encoding albumin fusion proteins of the invention are used as an agent to boost immunoresponsiveness among individuals having an acquired loss of B cell function. Conditions resulting in an acquired loss of B cell function that may be ameliorated or treated by administering the albumin fusion proteins of the invention and/or polynucleotides encoding albumin fusion proteins of the invention, include, but are not limited to, HIV Infection, AIDS, bone marrow transplant, and B cell chronic lymphocytic leukemia (CLL).

[0645] In another specific embodiment, albumin fusion proteins of the invention and/or polynucleotides encoding albumin fusion proteins of the invention are used as an agent to boost immunoresponsiveness among individuals having a temporary immune deficiency. Conditions resulting in a temporary immune deficiency that may be ameliorated or treated by administering the albumin fusion proteins of the invention and/or polynucleotides encoding albumin fusion proteins of the invention, include, but are not limited to, recovery from viral infections (e.g., influenza), conditions associated with malnutrition, recovery from infectious mononucleosis, or conditions associated with stress, recovery from measles, recovery from blood transfusion, and recovery from surgery.

[0646] In another specific embodiment, albumin fusion proteins of the invention and/or polynucleotides encoding albumin fusion proteins of the invention are used as a regulator of antigen presentation by monocytes, dendritic cells, and/or B-cells. In one embodiment, albumin fusion proteins of the invention and/or polynucleotides encoding albumin fusion proteins of the invention enhance antigen presentation or antagonizes antigen presentation in vitro or in vivo. Moreover, in related embodiments, this enhancement or antagonism of antigen presentation may be useful as an anti-tumor treatment or to modulate the immune system.

[0647] In another specific embodiment, albumin fusion proteins of the invention and/or polynucleotides encoding albumin fusion proteins of the invention are used as an agent to direct an individual's immune system towards development of a humoral response (i.e. TH2) as opposed to a TH1 cellular response.

[0648] In another specific embodiment, albumin fusion proteins of the invention and/or polynucleotides encoding albumin fusion proteins of the invention are used as a means to induce tumor proliferation and thus make it more susceptible to anti-neoplastic agents. For example, multiple myeloma is a slowly dividing disease and is thus refractory to virtually all anti-neoplastic regimens. If these cells were forced to proliferate more rapidly their susceptibility profile would likely change.

[0649] In another specific embodiment, albumin fusion proteins of the invention and/or polynucleotides encoding albumin fusion proteins of the invention are used as a stimulator of B cell production in pathologies such as ABM, chronic lymphocyte disorder and/or Common Variable Immunodificiency.

[0650] In another specific embodiment, albumin fusion proteins of the invention and/or polynucleotides encoding albumin fusion proteins of the invention are used as a therapy for generation and/or regeneration of lymphoid tissues following surgery, trauma or genetic defect. In another specific embodiment, albumin fusion proteins of the invention and/or polynucleotides encoding albumin fusion proteins of the invention are used in the pretreatment of bone marrow samples prior to transplant.

[0651] In another specific embodiment, albumin fusion proteins of the invention and/or polynucleotides encoding albumin fusion proteins of the invention are used as a gene-based therapy for genetically inherited disorders resulting in immuno-incompetence/immunodeficiency such as observed among SCID patients.

[0652] In another specific embodiment, albumin fusion proteins of the invention and/or polynucleotides encoding albumin fusion proteins of the invention are used as a means of activating monocytes/macrophages to defend against parasitic diseases that effect monocytes such as Leishmania.

[0653] In another specific embodiment, albumin fusion proteins of the invention and/or polynucleotides encoding albumin fusion proteins of the invention are used as a means of regulating secreted cytokines that are elicited by polypeptides of the invention.

[0654] In another embodiment, albumin fusion proteins of the invention and/or polynucleotides encoding albumin fusion proteins of the invention are used in one or more of the applications described herein, as they may apply to veterinary medicine.

[0655] In another specific embodiment, albumin fusion proteins of the invention and/or polynucleotides encoding albumin fusion proteins of the invention are used as a means of blocking various aspects of immune responses to foreign agents or self. Examples of diseases or conditions in which blocking of certain aspects of immune responses may be desired include autoimmune disorders such as lupus, and arthritis, as well as immunoresponsiveness to skin allergies, inflammation, bowel disease, injury and diseases/disorders associated with pathogens.

[0656] In another specific embodiment, albumin fusion proteins of the invention and/or polynucleotides encoding albumin fusion proteins of the invention are used as a therapy for preventing the B cell proliferation and Ig secretion associated with autoimmune diseases such as idiopathic thrombocytopenic purpura, systemic lupus erythematosus and multiple sclerosis.

[0657] In another specific embodiment, polypeptides, antibodies, polynucleotides and/or agonists or antagonists of the present fusion proteins of the invention and/or polynucleotides encoding albumin fusion proteins of the invention invention are used as a inhibitor of B and/or T cell migration in endothelial cells. This activity disrupts tissue architecture or cognate responses and is useful, for example in disrupting immune responses, and blocking sepsis.

[0658] In another specific embodiment, albumin fusion proteins of the invention and/or polynucleotides encoding albumin fusion proteins of the invention are used as a therapy for chronic hypergammaglobulinemia evident in such diseases as monoclonal gammopathy of undetermined significance (MGUS), Waldenstrom's disease, related idiopathic monoclonal gammopathies, and plasmacytomas.

[0659] In another specific embodiment, albumin fusion proteins of the invention and/or polynucleotides encoding albumin fusion proteins of the invention may be employed for instance to inhibit polypeptide chemotaxis and activation of macrophages and their precursors, and of neutrophils, basophils, B lymphocytes and some T-cell subsets, e.g., activated and CD8 cytotoxic T cells and natural killer cells, in certain autoimmune and chronic inflammatory and infective diseases. Examples of autoimmune diseases are described herein and include multiple sclerosis, and insulin-dependent diabetes.

[0660] The albumin fusion proteins of the invention and/or polynucleotides encoding albumin fusion proteins of the invention may also be employed to treat idiopathic hyper-eosinophilic syndrome by, for example, preventing eosinophil production and migration.

[0661] In another specific embodiment, albumin fusion proteins of the invention and/or polynucleotides encoding albumin fusion proteins of the invention are used to enhance or inhibit complement mediated cell lysis.

[0662] In another specific embodiment, albumin fusion proteins of the invention and/or polynucleotides encoding albumin fusion proteins of the invention are used to enhance or inhibit antibody dependent cellular cytotoxicity.

[0663] In another specific embodiment, albumin fusion proteins of the invention and/or polynucleotides encoding albumin fusion proteins of the invention may also be employed for treating atherosclerosis, for example, by preventing monocyte infiltration in the artery wall.

[0664] In another specific embodiment, albumin fusion proteins of the invention and/or polynucleotides encoding albumin fusion proteins of the invention may be employed to treat adult respiratory distress syndrome (ARDS).

[0665] In another specific embodiment, albumin fusion proteins of the invention and/or polynucleotides encoding albumin fusion proteins of the invention may be useful for stimulating wound and tissue repair, stimulating angiogenesis, and/or stimulating the repair of vascular or lymphatic diseases or disorders. Additionally, fusion proteins of the invention and/or polynucleotides encoding albumin fusion proteins of the invention may be used to stimulate the regeneration of mucosal surfaces.

[0666] In a specific embodiment, albumin fusion proteins of the invention and/or polynucleotides encoding albumin fusion proteins of the invention are used to diagnose, prognose, treat, and/or prevent a disorder characterized by primary or acquired immunodeficiency, deficient serum immunoglobulin production, recurrent infections, and/or immune system dysfunction. Moreover, fusion proteins of the invention and/or polynucleotides encoding albumin fusion proteins of the invention may be used to treat or prevent infections of the joints, bones, skin, and/or parotid glands, blood-borne infections (e.g., sepsis, meningitis, septic arthritis, and/or osteomyelitis), autoimmune diseases (e.g., those disclosed herein), inflammatory disorders, and malignancies, and/or any disease or disorder or condition associated with these infections, diseases, disorders and/or malignancies) including, but not limited to, CVlD, other primary immune deficiencies, HIV disease, CLL, recurrent bronchitis, sinusitis, otitis media, conjunctivitis, pneumonia, hepatitis, meningitis, herpes zoster (e.g., severe herpes zoster), and/or pneumocystis carnii. Other diseases and disorders that may be prevented, diagnosed, prognosed, and/or treated with fusion proteins of the invention and/or polynucleotides encoding albumin fusion proteins of the invention include, but are not limited to, HIV infection, HTLV-BLV infection, lymphopenia, phagocyte bactericidal dysfunction anemia, thrombocytopenia, and hemoglobinuria.

[0667] In another embodiment, albumin fusion proteins of the invention and/or polynucleotides encoding albumin fusion proteins of the invention are used to treat, and/or diagnose an individual having common variable immunodeficiency disease (“CVID”; also known as “acquired agammaglobulinemia” and “acquired hypogammaglobulinemia”) or a subset of this disease.

[0668] In a specific embodiment, albumin fusion proteins of the invention and/or polynucleotides encoding albumin fusion proteins of the invention may be used to diagnose, prognose, prevent, and/or treat cancers or neoplasms including immune cell or immune tissue-related cancers or neoplasms. Examples of cancers or neoplasms that may be prevented, diagnosed, or treated by fusion proteins of the invention and/or polynucleotides encoding albumin fusion proteins of the invention include, but are not limited to, acute myelogenous leukemia, chronic myelogenous leukemia, Hodgkin's disease, non-Hodgkin's lymphoma, acute lymphocytic anemia (ALL) Chronic lymphocyte leukemia, plasmacytomas, multiple myeloma, Burkitt's lymphoma, EBV-transformed diseases, and/or diseases and disorders described in the section entitled “Hyperproliferative Disorders” elsewhere herein.

[0669] In another specific embodiment, albumin fusion proteins of the invention and/or polynucleotides encoding albumin fusion proteins of the invention are used as a therapy for decreasing cellular proliferation of Large B-cell Lymphomas.

[0670] In another specific embodiment, albumin fusion proteins of the invention and/or polynucleotides encoding albumin fusion proteins of the invention are used as a means of decreasing the involvement of B cells and Ig associated with Chronic Myelogenous Leukemia.

[0671] In specific embodiments, the compositions of the invention are used as an agent to boost immunoresponsiveness among B cell immunodeficient individuals, such as, for example, an individual who has undergone a partial or complete splenectomy.

[0672] Blood-Related Disorders

[0673] The albumin fusion proteins of the invention and/or polynucleotides encoding albumin fusion proteins of the invention may be used to modulate hemostatic (the stopping of bleeding) or thrombolytic (clot dissolving) activity. For example, by increasing hemostatic or thrombolytic activity, fusion proteins of the invention and/or polynucleotides encoding albumin fusion proteins of the invention could be used to treat or prevent blood coagulation diseases, disorders, and/or conditions (e.g., afibrinogenemia, factor deficiencies, hemophilia), blood platelet diseases, disorders, and/or conditions (e.g., thrombocytopenia), or wounds resulting from trauma, surgery, or other causes. Alternatively, fusion proteins of the invention and/or polynucleotides encoding albumin fusion proteins of the invention that can decrease hemostatic or thrombolytic activity could be used to inhibit or dissolve clotting. These molecules could be important in the treatment or prevention of heart attacks (infarction), strokes, or scarring.

[0674] In specific embodiments, the albumin fusion proteins of the invention and/or polynucleotides encoding albumin fusion proteins of the invention may be used to prevent, diagnose, prognose, and/or treat thrombosis, arterial thrombosis, venous thrombosis, thromboembolism, pulmonary embolism, atherosclerosis, myocardial infarction, transient ischemic attack, unstable angina. In specific embodiments, the albumin fusion proteins of the invention and/or polynucleotides encoding albumin fusion proteins of the invention may be used for the prevention of occulsion of saphenous grafts, for reducing the risk of periprocedural thrombosis as might accompany angioplasty procedures, for reducing the risk of stroke in patients with atrial fibrillation including nonrheumatic atrial fibrillation, for reducing the risk of embolism associated with mechanical heart valves and or mitral valves disease. Other uses for the albumin fusion proteins of the invention and/or polynucleotides encoding albumin fusion proteins of the invention, include, but are not limited to, the prevention of occlusions in extrcorporeal devices (e.g., intravascular canulas, vascular access shunts in hemodialysis patients, hemodialysis machines, and cardiopulmonary bypass machines).

[0675] In another embodiment, albumin fusion proteins of the invention and/or polynucleotides encoding albumin fusion proteins of the invention, may be used to prevent, diagnose, prognose, and/or treat diseases and disorders of the blood and/or blood forming organs associated with the tissue(s) in which the polypeptide of the invention is expressed.

[0676] The fusion proteins of the invention and/or polynucleotides encoding albumin fusion proteins of the invention may be used to modulate hematopoietic activity (the formation of blood cells). For example, the albumin fusion proteins of the invention and/or polynucleotides encoding albumin fusion proteins of the invention may be used to increase the quantity of all or subsets of blood cells, such as, for example, erythrocytes, lymphocytes (B or T cells), myeloid cells (e.g., basophils, eosinophils, neutrophils, mast cells, macrophages) and platelets. The ability to decrease the quantity of blood cells or subsets of blood cells may be useful in the prevention, detection, diagnosis and/or treatment of anemias and leukopenias described below. Alternatively, the albumin fusion proteins of the invention and/or polynucleotides encoding albumin fusion proteins of the invention may be used to decrease the quantity of all or subsets of blood cells, such as, for example, erythrocytes, lymphocytes (B or T cells), myeloid cells (e.g., basophils, eosinophils, neutrophils, mast cells, macrophages) and platelets. The ability to decrease the quantity of blood cells or subsets of blood cells may be useful in the prevention, detection, diagnosis and/or treatment of leukocytoses, such as, for example eosinophilia.

[0677] The fusion proteins of the invention and/or polynucleotides encoding albumin fusion proteins of the invention may be used to prevent, treat, or diagnose blood dyscrasia.

[0678] Anemias are conditions in which the number of red blood cells or amount of hemoglobin (the protein that carries oxygen) in them is below normal. Anemia may be caused by excessive bleeding, decreased red blood cell production, or increased red blood cell destruction (hemolysis). The albumin fusion proteins of the invention and/or polynucleotides encoding albumin fusion proteins of the invention may be useful in treating, preventing, and/or diagnosing anemias. Anemias that may be treated prevented or diagnosed by the albumin fusion proteins of the invention and/or polynucleotides encoding albumin fusion proteins of the invention include iron deficiency anemia, hypochromic anemia, microcytic anemia, chlorosis, hereditary sideroblastic anemia, idiopathic acquired sideroblastic anemia, red cell aplasia, megaloblastic anemia (e.g., pernicious anemia, (vitamin B12 deficiency) and folic acid deficiency anemia), aplastic anemia, hemolytic anemias (e.g., autoimmune helolytic anemia, microangiopathic hemolytic anemia, and paroxysmal nocturnal hemoglobinuria). The albumin fusion proteins of the invention and/or polynucleotides encoding albumin fusion proteins of the invention may be useful in treating, preventing, and/or diagnosing anemias associated with diseases including but not limited to, anemias associated with systemic lupus erythematosus, cancers, lymphomas, chronic renal disease, and enlarged spleens. The albumin fusion proteins of the invention and/or polynucleotides encoding albumin fusion proteins of the invention may be useful in treating, preventing, and/or diagnosing anemias arising from drug treatments such as anemias associated with methyldopa, dapsone, and/or sulfadrugs. Additionally, fusion proteins of the invention and/or polynucleotides encoding albumin fusion proteins of the invention may be useful in treating, preventing, and/or diagnosing anemias associated with abnormal red blood cell architecture including but not limited to, hereditary spherocytosis, hereditary elliptocytosis, glucose-6-phosphate dehydrogenase deficiency, and sickle cell anemia.

[0679] The albumin fusion proteins of the invention and/or polynucleotides encoding albumin fusion proteins of the invention may be useful in treating, preventing, and/or diagnosing hemoglobin abnormalities, (e.g., those associated with sickle cell anemia, hemoglobin C disease, hemoglobin S—C disease, and hemoglobin E disease). Additionally, the albumin fusion proteins of the invention and/or polynucleotides encoding albumin fusion proteins of the invention may be useful in diagnosing, prognosing, preventing, and/or treating thalassemias, including, but not limited to, major and minor forms of alpha-thalassemia and beta-thalassemia.

[0680] In another embodiment, the albumin fusion proteins of the invention and/or polynucleotides encoding albumin fusion proteins of the invention may be useful in diagnosing, prognosing, preventing, and/or treating bleeding disorders including, but not limited to, thrombocytopenia (e.g., idiopathic thrombocytopenic purpura, and thrombotic thrombocytopenic purpura), Von Willebrand's disease, hereditary platelet disorders (e.g., storage pool disease such as Chediak-Higashi and Hermansky-Pudlak syndromes, thromboxane A2 dysfunction, thromboasthenia, and Bernard-Soulier syndrome), hemolytic-uremic syndrome, hemophelias such as hemophelia A or Factor VII deficiency and Christmas disease or Factor IX deficiency, Hereditary Hemorhhagic Telangiectsia, also known as Rendu-Osler-Weber syndrome, allergic purpura (Henoch Schonlein purpura) and disseminated intravascular coagulation.

[0681] The effect of the albumin fusion proteins of the invention and/or polynucleotides encoding albumin fusion proteins of the invention on the clotting time of blood may be monitored using any of the clotting tests known in the art including, but not limited to, whole blood partial thromboplastin time (PTT), the activated partial thromboplastin time (aPTT), the activated clotting time (ACT), the recalcified activated clotting time, or the Lee-White Clotting time.

[0682] Several diseases and a variety of drugs can cause platelet dysfunction. Thus, in a specific embodiment, the albumin fusion proteins of the invention and/or polynucleotides encoding albumin fusion proteins of the invention may be useful in diagnosing, prognosing, preventing, and/or treating acquired platelet dysfunction such as platelet dysfunction accompanying kidney failure, leukemia, multiple myeloma, cirrhosis of the liver, and systemic lupus erythematosus as well as platelet dysfunction associated with drug treatments, including treatment with aspirin, ticlopidine, nonsteroidal anti-inflammatory drugs (used for arthritis, pain, and sprains), and penicillin in high doses.

[0683] In another embodiment, the albumin fusion proteins of the invention and/or polynucleotides encoding albumin fusion proteins of the invention may be useful in diagnosing, prognosing, preventing, and/or treating diseases and disorders characterized by or associated with increased or decreased numbers of white blood cells. Leukopenia occurs when the number of white blood cells decreases below normal. Leukopenias include, but are not limited to, neutropenia and lymphocytopenia. An increase in the number of white blood cells compared to normal is known as leukocytosis. The body generates increased numbers of white blood cells during infection. Thus, leukocytosis may simply be a normal physiological parameter that reflects infection. Alternatively, leukocytosis may be an indicator of injury or other disease such as cancer. Leokocytoses, include but are not limited to, eosinophilia, and accumulations of macrophages. In specific embodiments, the albumin fusion proteins of the invention and/or polynucleotides encoding albumin fusion proteins of the invention may be useful in diagnosing, prognosing, preventing, and/or treating leukopenia. In other specific embodiments, the albumin fusion proteins of the invention and/or polynucleotides encoding albumin fusion proteins of the invention may be useful in diagnosing, prognosing, preventing, and/or treating leukocytosis.

[0684] Leukopenia may be a generalized decreased in all types of white blood cells, or may be a specific depletion of particular types of white blood cells. Thus, in specific embodiments, the albumin fusion proteins of the invention and/or polynucleotides encoding albumin fusion proteins of the invention may be useful in diagnosing, prognosing, preventing, and/or treating decreases in neutrophil numbers, known as neutropenia. Neutropenias that may be diagnosed, prognosed, prevented, and/or treated by the albumin fusion proteins of the invention and/or polynucleotides encoding albumin fusion proteins of the invention include, but are not limited to, infantile genetic agranulocytosis, familial neutropenia, cyclic neutropenia, neutropenias resulting from or associated with dietary deficiencies (e.g., vitamin B 12 deficiency or folic acid deficiency), neutropenias resulting from or associated with drug treatments (e.g., antibiotic regimens such as penicillin treatment, sulfonamide treatment, anticoagulant treatment, anticonvulsant drugs, anti-thyroid drugs, and cancer chemotherapy), and neutropenias resulting from increased neutrophil destruction that may occur in association with some bacterial or viral infections, allergic disorders, autoimmune diseases, conditions in which an individual has an enlarged spleen (e.g., Felty syndrome, malaria and sarcoidosis), and some drug treatment regimens.

[0685] The albumin fusion proteins of the invention and/or polynucleotides encoding albumin fusion proteins of the invention may be useful in diagnosing, prognosing, preventing, and/or treating lymphocytopenias (decreased numbers of B and/or T lymphocytes), including, but not limited to, lymphocytopenias resulting from or associated with stress, drug treatments (e.g., drug treatment with corticosteroids, cancer chemotherapies, and/or radiation therapies), AIDS infection and/or other diseases such as, for example, cancer, rheumatoid arthritis, systemic lupus erythematosus, chronic infections, some viral infections and/or hereditary disorders (e.g., DiGeorge syndrome, Wiskott-Aldrich Syndome, severe combined immunodeficiency, ataxia telangiectsia).

[0686] The albumin fusion proteins of the invention and/or polynucleotides encoding albumin fusion proteins of the invention may be useful in diagnosing, prognosing, preventing, and/or treating diseases and disorders associated with macrophage numbers and/or macrophage function including, but not limited to, Gaucher's disease, Niemann-Pick disease, Letterer-Siwe disease and Hand-Schuller-Christian disease.

[0687] In another embodiment, the albumin fusion proteins of the invention and/or polynucleotides encoding albumin fusion proteins of the invention may be useful in diagnosing, prognosing, preventing, and/or treating diseases and disorders associated with eosinophil numbers and/or eosinophil function including, but not limited to, idiopathic hypereosinophilic syndrome, eosinophilia-myalgia syndrome, and Hand-Schuller-Christian disease.

[0688] In yet another embodiment, the albumin fusion proteins of the invention and/or polynucleotides encoding albumin fusion proteins of the invention may be useful in diagnosing, prognosing, preventing, and/or treating leukemias and lymphomas including, but not limited to, acute lymphocytic (lymphpblastic) leukemia (ALL), acute myeloid (myelocytic, myelogenous, myeloblastic, or myelomonocytic) leukemia, chronic lymphocytic leukemia (e.g., B cell leukemias, T cell leukemias, Sezary syndrome, and Hairy cell leukenia), chronic myelocytic (myeloid, myelogenous, or granulocytic) leukemia, Hodgkin's lymphoma, non-hodgkin's lymphoma, Burkitt's lymphoma, and mycosis fungoides.

[0689] In other embodiments, the albumin fusion proteins of the invention and/or polynucleotides encoding albumin fusion proteins of the invention may be useful in diagnosing, prognosing, preventing, and/or treating diseases and disorders of plasma cells including, but not limited to, plasma cell dyscrasias, monoclonal gammaopathies, monoclonal gammopathies of undetermined significance, multiple myeloma, macroglobulinemia, Waldenstrom's macroglobulinemia, cryoglobulinemia, and Raynaud's phenomenon.

[0690] In other embodiments, the albumin fusion proteins of the invention and/or polynucleotides encoding albumin fusion proteins of the invention may be useful in treating, preventing, and/or diagnosing myeloproliferative disorders, including but not limited to, polycythemia vera, relative polycythemia, secondary polycythemia, myelofibrosis, acute myelofibrosis, agnogenic myelod metaplasia, thrombocythemia, (including both primary and seconday thrombocythemia) and chronic myelocytic leukemia.

[0691] In other embodiments, the albumin fusion proteins of the invention and/or polynucleotides encoding albumin fusion proteins of the invention may be useful as a treatment prior to surgery, to increase blood cell production.

[0692] In other embodiments, the albumin fusion proteins of the invention and/or polynucleotides encoding albumin fusion proteins of the invention may be useful as an agent to enhance the migration, phagocytosis, superoxide production, antibody dependent cellular cytotoxicity of neutrophils, eosionophils and macrophages.

[0693] In other embodiments, the albumin fusion proteins of the invention and/or polynucleotides encoding albumin fusion proteins of the invention may be useful as an agent to increase the number of stem cells in circulation prior to stem cells pheresis. In another specific embodiment, the albumin fusion proteins of the invention and/or polynucleotides encoding albumin fusion proteins of the invention may be useful as an agent to increase the number of stem cells in circulation prior to platelet pheresis.

[0694] In other embodiments, the albumin fusion proteins of the invention and/or polynucleotides encoding albumin fusion proteins of the invention may be useful as an agent to increase cytokine production.

[0695] In other embodiments, the albumin fusion proteins of the invention and/or polynucleotides encoding albumin fusion proteins of the invention may be useful in preventing, diagnosing, and/or treating primary hematopoietic disorders.

[0696] Hyperproliferative Disorders

[0697] In certain embodiments, fusion proteins of the invention and/or polynucleotides encoding albumin fusion proteins of the invention can be used to treat or detect hyperproliferative disorders, including neoplasms. Albumin fusion proteins of the invention and/or polynucleotides encoding albumin fusion proteins of the invention may inhibit the proliferation of the disorder through direct or indirect interactions. Alternatively, fusion proteins of the invention and/or polynucleotides encoding albumin fusion proteins of the invention may proliferate other cells which can inhibit the hyperproliferative disorder.

[0698] For example, by increasing an immune response, particularly increasing antigenic qualities of the hyperproliferative disorder or by proliferating, differentiating, or mobilizing T-cells, hyperproliferative disorders can be treated. This immune response may be increased by either enhancing an existing immune response, or by initiating a new immune response. Alternatively, decreasing an immune response may also be a method of treating hyperproliferative disorders, such as a chemotherapeutic agent.

[0699] Examples of hyperproliferative disorders that can be treated or detected by fusion proteins of the invention and/or polynucleotides encoding albumin fusion proteins of the invention include, but are not limited to neoplasms located in the: colon, abdomen, bone, breast, digestive system, liver, pancreas, peritoneum, endocrine glands (adrenal, parathyroid, pituitary, testicles, ovary, thymus, thyroid), eye, head and neck, nervous (central and peripheral), lymphatic system, pelvis, skin, soft tissue, spleen, thorax, and urogenital tract.

[0700] Similarly, other hyperproliferative disorders can also be treated or detected by fusion proteins of the invention and/or polynucleotides encoding albumin fusion proteins of the invention. Examples of such hyperproliferative disorders include, but are not limited to: Acute Childhood Lymphoblastic Leukemia, Acute Lymphoblastic Leukemia, Acute Lymphocytic Leukemia, Acute Myeloid Leukemia, Adrenocortical Carcinoma, Adult (Primary) Hepatocellular Cancer, Adult (Primary) Liver Cancer, Adult Acute Lymphocytic Leukemia, Adult Acute Myeloid Leukemia, Adult Hodgkin's Disease, Adult Hodgkin's Lymphoma, Adult Lymphocytic Leukemia, Adult Non-Hodgkin's Lymphoma, Adult Primary Liver Cancer, Adult Soft Tissue Sarcoma, AIDS-Related Lymphoma, AIDS-Related Malignancies, Anal Cancer, Astrocytoma, Bile Duct Cancer, Bladder Cancer, Bone Cancer, Brain Stem Glioma, Brain Tumors, Breast Cancer, Cancer of the Renal Pelvis and Ureter, Central Nervous System (Primary) Lymphoma, Central Nervous System Lymphoma, Cerebellar Astrocytoma, Cerebral Astrocytoma, Cervical Cancer, Childhood (Primary) Hepatocellular Cancer, Childhood (Primary) Liver Cancer, Childhood Acute Lymphoblastic Leukemia, Childhood Acute Myeloid Leukemia, Childhood Brain Stem Glioma, Childhood Cerebellar Astrocytoma, Childhood Cerebral Astrocytoma, Childhood Extracranial Germ Cell Tumors, Childhood Hodgkin's Disease, Childhood Hodgkin's Lymphoma, Childhood Hypothalamic and Visual Pathway Glioma, Childhood Lymphoblastic Leukemia, Childhood Medulloblastoma, Childhood Non-Hodgkin's Lymphoma, Childhood Pineal and Supratentorial Primitive Neuroectodermal Tumors, Childhood Primary Liver Cancer, Childhood Rhabdomyosarcoma, Childhood Soft Tissue Sarcoma, Childhood Visual Pathway and Hypothalamic Glioma, Chronic Lymphocytic Leukemia, Chronic Myelogenous Leukemia, Colon Cancer, Cutaneous T-Cell Lymphoma, Endocrine Pancreas Islet Cell Carcinoma, Endometrial Cancer, Ependymoma, Epithelial Cancer, Esophageal Cancer, Ewing's Sarcoma and Related Tumors, Exocrine Pancreatic Cancer, Extracranial Germ Cell Tumor, Extragonadal Germ Cell Tumor, Extrahepatic Bile Duct Cancer, Eye Cancer, Female Breast Cancer, Gaucher's Disease, Gallbladder Cancer, Gastric Cancer, Gastrointestinal Carcinoid Tumor, Gastrointestinal Tumors, Germ Cell Tumors, Gestational Trophoblastic Tumor, Hairy Cell Leukemia, Head and Neck Cancer, Hepatocellular Cancer, Hodgkin's Disease, Hodgkin's Lymphoma, Hyperganunaglobulinemia, Hypopharyngeal Cancer, Intestinal Cancers, Intraocular Melanoma, Islet Cell Carcinoma, Islet Cell Pancreatic Cancer, Kaposi's Sarcoma, Kidney Cancer, Laryngeal Cancer, Lip and Oral Cavity Cancer, Liver Cancer, Lung Cancer, Lymphoproliferative Disorders, Macroglobulinemia, Male Breast Cancer, Malignant Mesothelioma, Malignant Thymoma, Medulloblastoma, Melanoma, Mesothelioma, Metastatic Occult Primary Squamous Neck Cancer, Metastatic Primary Squamous Neck Cancer, Metastatic Squamous Neck Cancer, Multiple Myeloma, Multiple Myeloma/Plasma Cell Neoplasm, Myelodysplastic Syndrome, Myelogenous Leukemia, Myeloid Leukemia, Myeloproliferative Disorders, Nasal Cavity and Paranasal Sinus Cancer, Nasopharyngeal Cancer, Neuroblastoma, Non-Hodgkin's Lymphoma During Pregnancy, Nonmelanoma Skin Cancer, Non-Small Cell Lung Cancer, Occult Primary Metastatic Squamous Neck Cancer, Oropharyngeal Cancer, Osteo-/Malignant Fibrous Sarcoma, Osteosarcoma/Malignant Fibrous Histiocytoma, Osteosarcoma/Malignant Fibrous Histiocytoma of Bone, Ovarian Epithelial Cancer, Ovarian Germ Cell Tumor, Ovarian Low Malignant Potential Tumor, Pancreatic Cancer, Paraproteinemias, Purpura, Parathyroid Cancer, Penile Cancer, Pheochromocytoma, Pituitary Tumor, Plasma Cell Neoplasm/Multiple Myeloma, Primary Central Nervous System Lymphoma, Primary Liver Cancer, Prostate Cancer, Rectal Cancer, Renal Cell Cancer, Renal Pelvis and Ureter Cancer, Retinoblastoma, Rhabdomyosarcoma, Salivary Gland Cancer, Sarcoidosis Sarcomas, Sezary Syndrome, Skin Cancer, Small Cell Lung Cancer, Small Intestine Cancer, Soft Tissue Sarcoma, Squamous Neck Cancer, Stomach Cancer, Supratentorial Primitive Neuroectodermal and Pineal Tumors, T-Cell Lymphoma, Testicular Cancer, Thymoma, Thyroid Cancer, Transitional Cell Cancer of the Renal Pelvis and Ureter, Transitional Renal Pelvis and Ureter Cancer, Trophoblastic Tumors, Ureter and Renal Pelvis Cell Cancer, Urethral Cancer, Uterine Cancer, Uterine Sarcoma, Vaginal Cancer, Visual Pathway and Hypothalamic Glioma, Vulvar Cancer, Waldenstrom's Macroglobulinemia, Wilms' Tumor, and any other hyperproliferative disease, besides neoplasia, located in an organ system listed above.

[0701] In another preferred embodiment, albumin fusion proteins of the invention and/or polynucleotides encoding albumin fusion proteins of the invention are used to diagnose, prognose, prevent, and/or treat premalignant conditions and to prevent progression to a neoplastic or malignant state, including but not limited to those disorders described above. Such uses are indicated in conditions known or suspected of preceding progression to neoplasia or cancer, in particular, where non-neoplastic cell growth consisting of hyperplasia, metaplasia, or most particularly, dysplasia has occurred (for review of such abnormal growth conditions, see Robbins and Angell, 1976, Basic Pathology, 2d Ed., W. B. Saunders Co., Philadelphia, pp. 68-79.)

[0702] Hyperplasia is a form of controlled cell proliferation, involving an increase in cell number in a tissue or organ, without significant alteration in structure or function. Hyperplastic disorders which can be diagnosed, prognosed, prevented, and/or treated with fusion proteins of the invention and/or polynucleotides encoding albumin fusion proteins of the invention include, but are not limited to, angiofollicular mediastinal lymph node hyperplasia, angiolymphoid hyperplasia with eosinophilia, atypical melanocytic hyperplasia, basal cell hyperplasia, benign giant lymph node hyperplasia, cementum hyperplasia, congenital adrenal hyperplasia, congenital sebaceous hyperplasia, cystic hyperplasia, cystic hyperplasia of the breast, denture hyperplasia, ductal hyperplasia, endometrial hyperplasia, fibromuscular hyperplasia, focal epithelial hyperplasia, gingival hyperplasia, inflammatory fibrous hyperplasia, inflammatory papillary hyperplasia, intravascular papillary endothelial hyperplasia, nodular hyperplasia of prostate, nodular regenerative hyperplasia, pseudoepitheliomatous hyperplasia, senile sebaceous hyperplasia, and verrucous hyperplasia.

[0703] Metaplasia is a form of controlled cell growth in which one type of adult or fully differentiated cell substitutes for another type of adult cell. Metaplastic disorders which can be diagnosed, prognosed, prevented, and/or treated with fusion proteins of the invention and/or polynucleotides encoding albumin fusion proteins of the invention include, but are not limited to, agnogenic myeloid metaplasia, apocrine metaplasia, atypical metaplasia, autoparenchymatous metaplasia, connective tissue metaplasia, epithelial metaplasia, intestinal metaplasia, metaplastic anemia, metaplastic ossification, metaplastic polyps, myeloid metaplasia, primary myeloid metaplasia, secondary myeloid metaplasia, squamous metaplasia, squamous metaplasia of amnion, and symptomatic myeloid metaplasia.

[0704] Dysplasia is frequently a forerunner of cancer, and is found mainly in the epithelia; it is the most disorderly form of non-neoplastic cell growth, involving a loss in individual cell uniformity and in the architectural orientation of cells. Dysplastic cells often have abnormally large, deeply stained nuclei, and exhibit pleomorphism. Dysplasia characteristically occurs where there exists chronic irritation or inflammation. Dysplastic disorders which can be diagnosed, prognosed, prevented, and/or treated with fusion proteins of the invention and/or polynucleotides encoding albumin fusion proteins of the invention include, but are not limited to, anhidrotic ectodermal dysplasia, anterofacial dysplasia, asphyxiating thoracic dysplasia, atriodigital dysplasia, bronchopulmonary dysplasia, cerebral dysplasia, cervical dysplasia, chondroectodermal dysplasia, cleidocranial dysplasia, congenital ectodermal dysplasia, craniodiaphysial dysplasia, craniocarpotarsal dysplasia, craniometaphysial dysplasia, dentin dysplasia, diaphysial dysplasia, ectodermal dysplasia, enamel dysplasia, encephalo-ophthalmic dysplasia, dysplasia epiphysialis hemimelia, dysplasia epiphysialis multiplex, dysplasia epiphysialis punctata, epithelial dysplasia, faciodigitogenital dysplasia, familial fibrous dysplasia of jaws, familial white folded dysplasia, fibromuscular dysplasia, fibrous dysplasia of bone, florid osseous dysplasia, hereditary renal-retinal dysplasia, hidrotic ectodermal dysplasia, hypohidrotic ectodermal dysplasia, lymphopenic thymic dysplasia, mammary dysplasia, mandibulofacial dysplasia, metaphysial dysplasia, Mondini dysplasia, monostotic fibrous dysplasia, mucoepithelial dysplasia, multiple epiphysial dysplasia, oculoauriculovertebral dysplasia, oculodentodigital dysplasia, oculovertebral dysplasia, odontogenic dysplasia, opthalmomandibulomelic dysplasia, periapical cemental dysplasia, polyostotic fibrous dysplasia, pseudoachondroplastic spondyloepiphysial dysplasia, retinal dysplasia, septo-optic dysplasia, spondyloepiphysial dysplasia, and ventriculoradial dysplasia.

[0705] Additional pre-neoplastic disorders which can be diagnosed, prognosed, prevented, and/or treated with fusion proteins of the invention and/or polynucleotides encoding albumin fusion proteins of the invention include, but are not limited to, benign dysproliferative disorders (e.g., benign tumors, fibrocystic conditions, tissue hypertrophy, intestinal polyps, colon polyps, and esophageal dysplasia), leukoplakia, keratoses, Bowen's disease, Farmer's Skin, solar cheilitis, and solar keratosis.

[0706] In another embodiment, albumin fusion proteins of the invention and/or polynucleotides encoding albumin fusion proteins of the invention, may be used to diagnose and/or prognose disorders associated with the tissue(s) in which the polypeptide of the invention is expressed.

[0707] In another embodiment, albumin fusion proteins of the invention and/or polynucleotides encoding albumin fusion proteins of the invention conjugated to a toxin or a radioactive isotope, as described herein, may be used to treat cancers and neoplasms, including, but not limited to, those described herein. In a further preferred embodiment, albumin fusion proteins of the invention and/or polynucleotides encoding albumin fusion proteins of the invention conjugated to a toxin or a radioactive isotope, as described herein, may be used to treat acute myelogenous leukemia.

[0708] Additionally, fusion proteins of the invention and/or polynucleotides encoding albumin fusion proteins of the invention may affect apoptosis, and therefore, would be useful in treating a number of diseases associated with increased cell survival or the inhibition of apoptosis. For example, diseases associated with increased cell survival or the inhibition of apoptosis that could be diagnosed, prognosed, prevented, and/or treated by polynucleotides, polypeptides, and/or agonists or antagonists of the invention, include cancers (such as follicular lymphomas, carcinomas with p53 mutations, and hormone-dependent tumors, including, but not limited to colon cancer, cardiac tumors, pancreatic cancer, melanoma, retinoblastoma, glioblastoma, lung cancer, intestinal cancer, testicular cancer, stomach cancer, neuroblastoma, myxoma, myoma, lymphoma, endothelioma, osteoblastoma, osteoclastoma, osteosarcoma, chondrosarcoma, adenoma, breast cancer, prostate cancer, Kaposi's sarcoma and ovarian cancer); autoimmune disorders such as, multiple sclerosis, Sjogren's syndrome, Hashimoto's thyroiditis, biliary cirrhosis, Behcet's disease, Crohn's disease, polymyositis, systemic lupus erythematosus and immune-related glomerulonephritis and rheumatoid arthritis) and viral infections (such as herpes viruses, pox viruses and adenoviruses), inflammation, graft v. host disease, acute graft rejection, and chronic graft rejection.

[0709] In preferred embodiments, fusion proteins of the invention and/or polynucleotides encoding albumin fusion proteins of the invention are used to inhibit growth, progression, and/or metastasis of cancers, in particular those listed above.

[0710] Additional diseases or conditions associated with increased cell survival that could be diagnosed, prognosed, prevented, and/or treated by fusion proteins of the invention and/or polynucleotides encoding albumin fusion proteins of the invention, include, but are not limited to, progression, and/or metastases of malignancies and related disorders such as leukemia (including acute leukemias (e.g., acute lymphocytic leukemia, acute myelocytic leukemia (including myeloblastic, promyelocytic, myelomonocytic, monocytic, and erythroleukemia)) and chronic leukemias (e.g., chronic myelocytic (granulocytic) leukemia and chronic lymphocytic leukemia)), polycythemia vera, lymphomas (e.g., Hodgkin's disease and non-Hodgkin's disease), multiple myeloma, Waldenstrom's macroglobulinemia, heavy chain disease, and solid tumors including, but not limited to, sarcomas and carcinomas such as fibrosarcoma, myxosarcoma, liposarcoma, chondrosarcoma, osteogenic sarcoma, chordoma, angiosarcoma, endotheliosarcoma, lymphangiosarcoma, lymphangioendotheliosarcoma, synovioma, mesothelioma, Ewing's tumor, leiomyosarcoma, rhabdomyosarcoma, colon carcinoma, pancreatic cancer, breast cancer, ovarian cancer, prostate cancer, squamous cell carcinoma, basal cell carcinoma, adenocarcinoma, sweat gland carcinoma, sebaceous gland carcinoma, papillary carcinoma, papillary adenocarcinomas, cystadenocarcinoma, medullary carcinoma, bronchogenic carcinoma, renal cell carcinoma, hepatoma, bile duct carcinoma, choriocarcinoma, seminoma, embryonal carcinoma, Wilm's tumor, cervical cancer, testicular tumor, lung carcinoma, small cell lung carcinoma, bladder carcinoma, epithelial carcinoma, glioma, astrocytoma, medulloblastoma, craniopharyngioma, ependymoma, pinealoma, emangioblastoma, acoustic neuroma, oligodendroglioma, menangioma, melanoma, neuroblastoma, and retinoblastoma.

[0711] Diseases associated with increased apoptosis that could be diagnosed, prognosed, prevented, and/or treated by fusion proteins of the invention and/or polynucleotides encoding albumin fusion proteins of the invention, include AIDS; neurodegenerative disorders (such as Alzheimer's disease, Parkinson's disease, amyotrophic lateral sclerosis, retinitis pigmentosa, cerebellar degeneration and brain tumor or prior associated disease); autoimmune disorders (such as, multiple sclerosis, Sjogren's syndrome, Hashimoto's thyroiditis, biliary cirrhosis, Behcet's disease, Crohn's disease, polymyositis, systemic lupus erythematosus and immune-related glomerulonephritis and rheumatoid arthritis) myelodysplastic syndromes (such as aplastic anemia), graft v. host disease, ischemic injury (such as that caused by myocardial infarction, stroke and reperfusion injury), liver injury (e.g., hepatitis related liver injury, ischemia/reperfusion injury, cholestosis (bile duct injury) and liver cancer); toxin-induced liver disease (such as that caused by alcohol), septic shock, cachexia and anorexia.

[0712] Hyperproliferative diseases and/or disorders that could be diagnosed, prognosed, prevented, and/or treated by fusion proteins of the invention and/or polynucleotides encoding albumin fusion proteins of the invention, include, but are not limited to, neoplasms located in the liver, abdomen, bone, breast, digestive system, pancreas, peritoneum, endocrine glands (adrenal, parathyroid, pituitary, testicles, ovary, thymus, thyroid), eye, head and neck, nervous system (central and peripheral), lymphatic system, pelvis, skin, soft tissue, spleen, thorax, and urogenital tract.

[0713] Similarly, other hyperproliferative disorders can also be diagnosed, prognosed, prevented, and/or treated by fusion proteins of the invention and/or polynucleotides encoding albumin fusion proteins of the invention. Examples of such hyperproliferative disorders include, but are not limited to: hypergammaglobulinemia, lymphoproliferative disorders, paraproteinemias, purpura, sarcoidosis, Sezary Syndrome, Waldenstron's macroglobulinemia, Gaucher's Disease, histiocytosis, and any other hyperproliferative disease, besides neoplasia, located in an organ system listed above.

[0714] Another preferred embodiment utilizes polynucleotides encoding albumin fusion proteins of the invention to inhibit aberrant cellular division, by gene therapy using the present invention, and/or protein fusions or fragments thereof.

[0715] Thus, the present invention provides a method for treating cell proliferative disorders by inserting into an abnormally proliferating cell a polynucleotide encoding an albumin fusion protein of the present invention, wherein said polynucleotide represses said expression.

[0716] Another embodiment of the present invention provides a method of treating cell-proliferative disorders in individuals comprising administration of one or more active gene copies of the present invention to an abnormally proliferating cell or cells. In a preferred embodiment, polynucleotides of the present invention is a DNA construct comprising a recombinant expression vector effective in expressing a DNA sequence encoding said polynucleotides. In another preferred embodiment of the present invention, the DNA construct encoding the fusion protein of the present invention is inserted into cells to be treated utilizing a retrovirus, or more preferably an adenoviral vector (See G J. Nabel, et. al., PNAS 1999 96: 324-326, which is hereby incorporated by reference). In a most preferred embodiment, the viral vector is defective and will not transform non-proliferating cells, only proliferating cells. Moreover, in a preferred embodiment, the polynucleotides of the present invention inserted into proliferating cells either alone, or in combination with or fused to other polynucleotides, can then be modulated via an external stimulus (i.e. magnetic, specific small molecule, chemical, or drug administration, etc.), which acts upon the promoter upstream of said polynucleotides to induce expression of the encoded protein product. As such the beneficial therapeutic affect of the present invention may be expressly modulated (i.e. to increase, decrease, or inhibit expression of the present invention) based upon said external stimulus.

[0717] Polynucleotides of the present invention may be useful in repressing expression of oncogenic genes or antigens. By “repressing expression of the oncogenic genes” is intended the suppression of the transcription of the gene, the degradation of the gene transcript (pre-mess age RNA), the inhibition of splicing, the destruction of the messenger RNA, the prevention of the post-translational modifications of the protein, the destruction of the protein, or the inhibition of the normal function of the protein.

[0718] For local administration to abnormally proliferating cells, polynucleotides of the present invention may be administered by any method known to those of skill in the art including, but not limited to transfection, electroporation, microinjection of cells, or in vehicles such as liposomes, lipofectin, or as naked polynucleotides, or any other method described throughout the specification. The polynucleotide of the present invention may be delivered by known gene delivery systems such as, but not limited to, retroviral vectors (Gilboa, J. Virology 44:845 (1982); Hocke, Nature 320:275 (1986); Wilson, et al., Proc. Natl. Acad. Sci. U.S.A. 85:3014), vaccinia virus system (Chakrabarty et al., Mol. Cell. Biol. 5:3403 (1985) or other efficient DNA delivery systems (Yates et al., Nature 313:812 (1985)) known to those skilled in the art. These references are exemplary only and are hereby incorporated by reference. In order to specifically deliver or transfect cells which are abnormally proliferating and spare non-dividing cells, it is preferable to utilize a retrovirus, or adenoviral (as described in the art and elsewhere herein) delivery system known to those of skill in the art. Since host DNA replication is required for retroviral DNA to integrate and the retrovirus will be unable to self replicate due to the lack of the retrovirus genes needed for its life cycle. Utilizing such a retroviral delivery system for polynucleotides of the present invention will target said gene and constructs to abnormally proliferating cells and will spare the non-dividing normal cells.

[0719] The polynucleotides of the present invention may be delivered directly to cell proliferative disorder/disease sites in internal organs, body cavities and the like by use of imaging devices used to guide an injecting needle directly to the disease site. The polynucleotides of the present invention may also be administered to disease sites at the time of surgical intervention.

[0720] By “cell proliferative disease” is meant any human or animal disease or disorder, affecting any one or any combination of organs, cavities, or body parts, which is characterized by single or multiple local abnormal proliferations of cells, groups of cells, or tissues, whether benign or malignant.

[0721] Any amount of the polynucleotides of the present invention may be administered as long as it has a biologically inhibiting effect on the proliferation of the treated cells. Moreover, it is possible to administer more than one of the polynucleotide of the present invention simultaneously to the same site. By “biologically inhibiting” is meant partial or total growth inhibition as well as decreases in the rate of proliferation or growth of the cells. The biologically inhibitory dose may be determined by assessing the effects of the polynucleotides of the present invention on target malignant or abnormally proliferating cell growth in tissue culture, tumor growth in animals and cell cultures, or any other method known to one of ordinary skill in the art.

[0722] Moreover, fusion proteins of the invention and/or polynucleotides encoding albumin fusion proteins of the invention of the present invention are useful in inhibiting the angiogenesis of proliferative cells or tissues, either alone, as a protein fusion, or in combination with other polypeptides directly or indirectly, as described elsewhere herein. In a most preferred embodiment, said anti-angiogenesis effect may be achieved indirectly, for example, through the inhibition of hematopoietic, tumor-specific cells, such as tumor-associated macrophages (See Joseph I B, et al. J Natl Cancer lust, 90(21):1648-53 (1998), which is hereby incorporated by reference).

[0723] Albumin fusion proteins of the invention and/or polynucleotides encoding albumin fusion proteins of the invention may be useful in inhibiting proliferative cells or tissues through the induction of apoptosis. These fusion protieins and/or polynucleotides may act either directly, or indirectly to induce apoptosis of proliferative cells and tissues, for example in the activation of a death-domain receptor, such as tumor necrosis factor (TNF) receptor-1, CD95 (Fas/APO-1), TNF-receptor-related apoptosis-mediated protein (TRAMP) and TNF-related apoptosis-inducing ligand (TRAIL) receptor-1 and -2 (See Schulze-Osthoff K, et. al., Eur J Biochem 254(3):439-59 (1998), which is hereby incorporated by reference). Moreover, in another preferred embodiment of the present invention, these fusion proteins and/or polynucleotides may induce apoptosis through other mechanisms, such as in the activation of other proteins which will activate apoptosis, or through stimulating the expression of these proteins, either alone or in combination with small molecule drugs or adjuviants, such as apoptonin, galectins, thioredoxins, anti-inflammatory proteins (See for example, Mutat Res 400(1-2):447-55 (1998), Med. Hypotheses. 50(5):423-33 (1998), Chem Biol Interact. April 24; 111-112:23-34 (1998), J Mol Med. 76(6):402-12 (1998), Int J Tissue React; 20(1):3-15 (1998), which are all hereby incorporated by reference).

[0724] Albumin fusion proteins of the invention and/or polynucleotides encoding albumin fusion proteins of the invention are useful in inhibiting the metastasis of proliferative cells or tissues. Inhibition may occur as a direct result of administering these albumin fusion proteins and/or polynucleotides, or indirectly, such as activating the expression of proteins known to inhibit metastasis, for example alpha 4 integrins, (See, e.g., Curr Top Microbiol Immunol 1998; 231:125-41, which is hereby incorporated by reference). Such thereapeutic affects of the present invention may be achieved either alone, or in combination with small molecule drugs or adjuvants.

[0725] In another embodiment, the invention provides a method of delivering compositions containing the albumin fusion proteins of the invention and/or polynucleotides encoding albumin fusion proteins of the invention to targeted cells expressing the a polypeptide bound by, that binds to, or associates with an albumin fusion protein of the invention. Albumin fusion proteins of the invention may be associated with heterologous polypeptides, heterologous nucleic acids, toxins, or prodrugs via hydrophobic, hydrophilic, ionic and/or covalent interactions.

[0726] Albumin fusion proteins of the invention are useful in enhancing the immunogenicity and/or antigenicity of proliferating cells or tissues, either directly, such as would occur if the albumin fusion proteins of the invention ‘vaccinated’ the immune response to respond to proliferative antigens and immunogens, or indirectly, such as in activating the expression of proteins known to enhance the immune response (e.g. chemokines), to said antigens and immunogens.

[0727] Renal Disorders

[0728] Albumin fusion proteins of the invention and/or polynucleotides encoding albumin fusion proteins of the invention, may be used to treat, prevent, diagnose, and/or prognose disorders of the renal system. Renal disorders which can be diagnosed, prognosed, prevented, and/or treated with compositions of the invention include, but are not limited to, kidney failure, nephritis, blood vessel disorders of kidney, metabolic and congenital kidney disorders, urinary disorders of the kidney, autoimmune disorders, sclerosis and necrosis, electrolyte imbalance, and kidney cancers.

[0729] Kidney diseases which can be diagnosed, prognosed, prevented, and/or treated with compositions of the invention include, but are not limited to, acute kidney failure, chronic kidney failure, atheroembolic renal failure, end-stage renal disease, inflammatory diseases of the kidney (e.g., acute glomerulonephritis, postinfectious glomerulonephritis, rapidly progressive glomerulonephritis, nephrotic syndrome, membranous glomerulonephritis, familial nephrotic syndrome, membranoproliferative glomerulonephritis I and II, mesangial proliferative glomerulonephritis, chronic glomerulonephritis, acute tubulointerstitial nephritis, chronic tubulointerstitial nephritis, acute post-streptococcal glomerulonephritis (PSGN), pyelonephritis, lupus nephritis, chronic nephritis, interstitial nephritis, and post-streptococcal glomerulonephritis), blood vessel disorders of the kidneys (e.g., kidney infarction, atheroembolic kidney disease, cortical necrosis, malignant nephrosclerosis, renal vein thrombosis, renal underperfusion, renal retinopathy, renal ischemia-reperfusion, renal artery embolism, and renal artery stenosis), and kidney disorders resulting form urinary tract disease (e.g., pyelonephritis, hydronephrosis, urolithiasis (renal lithiasis, nephrolithiasis), reflux nephropathy, urinary tract infections, urinary retention, and acute or chronic unilateral obstructive uropathy.)

[0730] In addition, compositions of the invention can be used to diagnose, prognose, prevent, and/or treat metabolic and congenital disorders of the kidney (e.g., uremia, renal amyloidosis, renal osteodystrophy, renal tubular acidosis, renal glycosuria, nephrogenic diabetes insipidus, cystinuria, Fanconi's syndrome, renal fibrocystic osteosis (renal rickets), Hartnup disease, Bartter's syndrome, Liddle's syndrome, polycystic kidney disease, medullary cystic disease, medullary sponge kidney, Alport's syndrome, nail-patella syndrome, congenital nephrotic syndrome, CRUSH syndrome, horseshoe kidney, diabetic nephropathy, nephrogenic diabetes insipidus, analgesic nephropathy, kidney stones, and membranous nephropathy), and autoimmune disorders of the kidney (e.g., systemic lupus erythematosus (SLE), Goodpasture syndrome, IgA nephropathy, and IgM mesangial proliferative glomerulonephritis).

[0731] Compositions of the invention can also be used to diagnose, prognose, prevent, and/or treat sclerotic or necrotic disorders of the kidney (e.g., glomerulosclerosis, diabetic nephropathy, focal segmental glomerulosclerosis (FSGS), necrotizing glomerulonephritis, and renal papillary necrosis), cancers of the kidney (e.g., nephroma, hypernephroma, nephroblastoma, renal cell cancer, transitional cell cancer, renal adenocarcinoma, squamous cell cancer, and Wilm's tumor), and electrolyte imbalances (e.g., nephrocalcinosis, pyuria, edema, hydronephritis, proteinuria, hyponatremia, hypernatremia, hypokalemia, hyperkalemia, hypocalcemia, hypercalcemia, hypophosphatemia, and hyperphosphatemia).

[0732] Compositions of the invention may be administered using any method known in the art, including, but not limited to, direct needle injection at the delivery site, intravenous injection, topical administration, catheter infusion, biolistic injectors, particle accelerators, gelfoam sponge depots, other commercially available depot materials, osmotic pumps, oral or suppositorial solid pharmaceutical formulations, decanting or topical applications during surgery, aerosol delivery. Such methods are known in the art. Compositions of the invention may be administered as part of a Therapeutic, described in more detail below. Methods of delivering polynucleotides of the invention are described in more detail herein.

[0733] Cardiovascular Disorders

[0734] Albumin fusion proteins of the invention and/or polynucleotides encoding albumin fusion proteins of the invention, may be used to treat, prevent, diagnose, and/or prognose cardiovascular disorders, including, but not limited to, peripheral artery disease, such as limb ischemia.

[0735] Cardiovascular disorders include, but are not limited to, cardiovascular abnormalities, such as arterio-arterial fistula, arteriovenous fistula, cerebral arteriovenous malformations, congenital heart defects, pulmonary atresia, and Scimitar Syndrome. Congenital heart defects include, but are not limited to, aortic coarctation, cor triatriatum, coronary vessel anomalies, crisscross heart, dextrocardia, patent ductus arteriosus, Ebstein's anomaly, Eisenmenger complex, hypoplastic left heart syndrome, levocardia, tetralogy of fallot, transposition of great vessels, double outlet right ventricle, tricuspid atresia, persistent truncus arteriosus, and heart septal defects, such as aortopulmonary septal defect, endocardial cushion defects, Lutembacher's Syndrome, trilogy of Fallot, ventricular heart septal defects.

[0736] Cardiovascular disorders also include, but are not limited to, heart disease, such as arrhythmias, carcinoid heart disease, high cardiac output, low cardiac output, cardiac tamponade, endocarditis (including bacterial), heart aneurysm, cardiac arrest, congestive heart failure, congestive cardiomyopathy, paroxysmal dyspnea, cardiac edema, heart hypertrophy, congestive cardiomyopathy, left ventricular hypertrophy, right ventricular hypertrophy, post-infarction heart rupture, ventricular septal rupture, heart valve diseases, myocardial diseases, myocardial ischemia, pericardial effusion, pericarditis (including constrictive and tuberculous), pneumopericardium, postpericardiotomy syndrome, pulmonary heart disease, rheumatic heart disease, ventricular dysfunction, hyperemia, cardiovascular pregnancy complications, Scimitar Syndrome, cardiovascular syphilis, and cardiovascular tuberculosis.

[0737] Arrhythmias include, but are not limited to, sinus arrhythmia, atrial fibrillation, atrial flutter, bradycardia, extrasystole, Adams-Stokes Syndrome, bundle-branch block, sinoatrial block, long QT syndrome, parasystole, Lown-Ganong-Levine Syndrome, Mahaim-type pre-excitation syndrome, Wolff-Parkinson-White syndrome, sick sinus syndrome, tachycardias, and ventricular fibrillation. Tachycardias include paroxysmal tachycardia, supraventricular tachycardia, accelerated idioventricular rhythm, atrioventricular nodal reentry tachycardia, ectopic atrial tachycardia, ectopic junctional tachycardia, sinoatrial nodal reentry tachycardia, sinus tachycardia, Torsades de Pointes, and ventricular tachycardia.

[0738] Heart valve diseases include, but are not limited to, aortic valve insufficiency, aortic valve stenosis, hear murmurs, aortic valve prolapse, mitral valve prolapse, tricuspid valve prolapse, mitral valve insufficiency, mitral valve stenosis, pulmonary atresia, pulmonary valve insufficiency, pulmonary valve stenosis, tricuspid atresia, tricuspid valve insufficiency, and tricuspid valve stenosis.

[0739] Myocardial diseases include, but are not limited to, alcoholic cardiomyopathy, congestive cardiomyopathy, hypertrophic cardiomyopathy, aortic subvalvular stenosis, pulmonary subvalvular stenosis, restrictive cardiomyopathy, Chagas cardiomyopathy, endocardial fibroelastosis, endomyocardial fibrosis, Kearns Syndrome, myocardial reperfusion injury, and myocarditis.

[0740] Myocardial ischemias include, but are not limited to, coronary disease, such as angina pectoris, coronary aneurysm, coronary arteriosclerosis, coronary thrombosis, coronary vasospasm, myocardial infarction and myocardial stunning.

[0741] Cardiovascular diseases also include vascular diseases such as aneurysms, angiodysplasia, angiomatosis, bacillary angiomatosis, Hippel-Lindau Disease, Klippel-Trenaunay-Weber Syndrome, Sturge-Weber Syndrome, angioneurotic edema, aortic diseases, Takayasu's Arteritis, aortitis, Leriche's Syndrome, arterial occlusive diseases, arteritis, enarteritis, polyarteritis nodosa, cerebrovascular disorders, diabetic angiopathies, diabetic retinopathy, embolisms, thrombosis, erythromelalgia, hemorrhoids, hepatic veno-occlusive disease, hypertension, hypotension, ischemia, peripheral vascular diseases, phlebitis, pulmonary veno-occlusive disease, Raynaud's disease, CREST syndrome, retinal vein occlusion, Scimitar syndrome, superior vena cava syndrome, telangiectasia, atacia telangiectasia, hereditary hemorrhagic telangiectasia, varicocele, varicose veins, varicose ulcer, vasculitis, and venous insufficiency.

[0742] Aneurysms include, but are not limited to, dissecting aneurysms, false aneurysms, infected aneurysms, ruptured aneurysms, aortic aneurysms, cerebral aneurysms, coronary aneurysms, heart aneurysms, and iliac aneurysms.

[0743] Arterial occlusive diseases include, but are not limited to, arteriosclerosis, intermittent claudication, carotid stenosis, fibromuscular dysplasias, mesenteric vascular occlusion, Moyamoya disease, renal artery obstruction, retinal artery occlusion, and thromboangiitis obliterans.

[0744] Cerebrovascular disorders include, but are not limited to, carotid artery diseases, cerebral amyloid angiopathy, cerebral aneurysm, cerebral anoxia, cerebral arteriosclerosis, cerebral arteriovenous malformation, cerebral artery diseases, cerebral embolism and thrombosis, carotid artery thrombosis, sinus thrombosis, Wallenberg's syndrome, cerebral hemorrhage, epidural hematoma, subdural hematoma, subaraxhnoid hemorrhage, cerebral infarction, cerebral ischemia (including transient), subclavian steal syndrome, periventricular leukomalacia, vascular headache, cluster headache, migraine, and vertebrobasilar insufficiency.

[0745] Embolisms include, but are not limited to, air embolisms, amniotic fluid embolisms, cholesterol embolisms, blue toe syndrome, fat embolisms, pulmonary embolisms, and thromoboembolisms. Thrombosis include, but are not limited to, coronary thrombosis, hepatic vein thrombosis, retinal vein occlusion, carotid artery thrombosis, sinus thrombosis, Wallenberg's syndrome, and thrombophlebitis.

[0746] Ischemic disorders include, but are not limited to, cerebral ischemia, ischemic colitis, compartment syndromes, anterior compartment syndrome, myocardial ischemia, reperfusion injuries, and peripheral limb ischemia. Vasculitis includes, but is not limited to, aortitis, arteritis, Behcet's Syndrome, Churg-Strauss Syndrome, mucocutaneous lymph node syndrome, thromboangiitis obliterans, hypersensitivity vasculitis, Schoenlein-Henoch purpura, allergic cutaneous vasculitis, and Wegener's granulomatosis.

[0747] Albumin fusion proteins of the invention and/or polynucleotides encoding albumin fusion proteins of the invention may be administered using any method known in the art, including, but not limited to, direct needle injection at the delivery site, intravenous injection, topical administration, catheter infusion, biolistic injectors, particle accelerators, gelfoam sponge depots, other commercially available depot materials, osmotic pumps, oral or suppositorial solid pharmaceutical formulations, decanting or topical applications during surgery, aerosol delivery. Such methods are known in the art. Methods of delivering polynucleotides are described in more detail herein.

[0748] Respiratory Disorders

[0749] Albumin fusion proteins of the invention and/or polynucleotides encoding albumin fusion proteins of the invention may be used to treat, prevent, diagnose, and/or prognose diseases and/or disorders of the respiratory system.

[0750] Diseases and disorders of the respiratory system include, but are not limited to, nasal vestibulitis, nonallergic rhinitis (e.g., acute rhinitis, chronic rhinitis, atrophic rhinitis, vasomotor rhinitis), nasal polyps, and sinusitis, juvenile angiofibromas, cancer of the nose and juvenile papillomas, vocal cord polyps, nodules (singer's nodules), contact ulcers, vocal cord paralysis, laryngoceles, pharyngitis (e.g., viral and bacterial), tonsillitis, tonsillar cellulitis, parapharyngeal abscess, laryngitis, laryngoceles, and throat cancers (e.g., cancer of the nasopharynx, tonsil cancer, larynx cancer), lung cancer (e.g., squamous cell carcinoma, small cell (oat cell) carcinoma, large cell carcinoma, and adenocarcinoma), allergic disorders (eosinophilic pneumonia, hypersensitivity pneumonitis (e.g., extrinsic allergic alveolitis, allergic interstitial pneumonitis, organic dust pneumoconiosis, allergic bronchopulmonary aspergillosis, asthma, Wegener's granulomatosis (granulomatous vasculitis), Goodpasture's syndrome)), pneumonia (e.g., bacterial pneumonia (e.g., Streptococcus pneumoniae (pneumoncoccal pneumonia), Staphylococcus aureus (staphylococcal pneumonia), Gram-negative bacterial pneumonia (caused by, e.g., Klebsiella and Pseudomas spp.), Mycoplasma pneumoniae pneumonia, Hemophilus influenzae pneumonia, Legionella pneumophila (Legionnaires' disease), and Chlamydia psittaci (Psittacosis)), and viral pneumonia (e.g., influenza, chickenpox (varicella).

[0751] Additional diseases and disorders of the respiratory system include, but are not limited to bronchiolitis, polio (poliomyelitis), croup, respiratory syncytial viral infection, mumps, erythema infectiosum (fifth disease), roseola infantum, progressive rubella panencephalitis, german measles, and subacute sclerosing panencephalitis), fungal pneumonia (e.g., Histoplasmosis, Coccidioidomycosis, Blastomycosis, fungal infections in people with severely suppressed immune systems (e.g., cryptococcosis, caused by Cryptococcus neoformans; aspergillosis, caused by Aspergillus spp.; candidiasis, caused by Candida; and mucormycosis)), Pneumocystis carinii (pneumocystis pneumonia), atypical pneumonias (e.g., Mycoplasma and Chlamydia spp.), opportunistic infection pneumonia, nosocomial pneumonia, chemical pneumonitis, and aspiration pneumonia, pleural disorders (e.g., pleurisy, pleural effusion, and pneumothorax (e.g., simple spontaneous pneumothorax, complicated spontaneous pneumothorax, tension pneumothorax)), obstructive airway diseases (e.g., asthma, chronic obstructive pulmonary disease (COPD), emphysema, chronic or acute bronchitis), occupational lung diseases (e.g., silicosis, black lung (coal workers' pneumoconiosis), asbestosis, berylliosis, occupational asthsma, byssinosis, and benign pneumoconioses), Infiltrative Lung Disease (e.g., pulmonary fibrosis (e.g., fibrosing alveolitis, usual interstitial pneumonia), idiopathic pulmonary fibrosis, desquamative interstitial pneumonia, lymphoid interstitial pneumonia, histiocytosis X (e.g., Letterer-Siwe disease, Hand-Schüller-Christian disease, eosinophilic granuloma), idiopathic pulmonary hemosiderosis, sarcoidosis and pulmonary alveolar proteinosis), Acute respiratory distress syndrome (also called, e.g., adult respiratory distress syndrome), edema, pulmonary embolism, bronchitis (e.g., viral, bacterial), bronchiectasis, atelectasis, lung abscess (caused by, e.g., Staphylococcus aureus or Legionella pneumophila), and cystic fibrosis.

[0752] Anti-Angiogenesis Activity

[0753] The naturally occurring balance between endogenous stimulators and inhibitors of angiogenesis is one in which inhibitory influences predominate. Rastinejad et al., Cell 56:345-355 (1989). In those rare instances in which neovascularization occurs under normal physiological conditions, such as wound healing, organ regeneration, embryonic development, and female reproductive processes, angiogenesis is stringently regulated and spatially and temporally delimited. Under conditions of pathological angiogenesis such as that characterizing solid tumor growth, these regulatory controls fail. Unregulated angiogenesis becomes pathologic and sustains progression of many neoplastic and non-neoplastic diseases. A number of serious diseases are dominated by abnormal neovascularization including solid tumor growth and metastases, arthritis, some types of eye disorders, and psoriasis. See, e.g., reviews by Moses et al., Biotech. 9:630-634 (1991); Folkman et al., N. Engl. J. Med., 333:1757-1763 (1995); Auerbach et al., J. Microvasc. Res. 29:401-411 (1985); Folkman, Advances in Cancer Research, eds. Klein and Weinhouse, Academic Press, New York, pp. 175-203 (1985); Patz, Am. J. Opthalmol. 94:715-743 (1982); and Folkman et al., Science 221:719-725 (1983). In a number of pathological conditions, the process of angiogenesis contributes to the disease state. For example, significant data have accumulated which suggest that the growth of solid tumors is dependent on angiogenesis. Folkman and Klagsbrun, Science 235:442-447 (1987).

[0754] The present invention provides for treatment of diseases or disorders associated with neovascularization by administration of fusion proteins of the invention and/or polynucleotides encoding albumin fusion proteins of the invention. Malignant and metastatic conditions which can be treated with the polynucleotides and polypeptides, or agonists or antagonists of the invention include, but are not limited to, malignancies, solid tumors, and cancers described herein and otherwise known in the art (for a review of such disorders, see Fishman et al., Medicine, 2d Ed., J. B. Lippincott Co., Philadelphia (1985)). Thus, the present invention provides a method of treating an angiogenesis-related disease and/or disorder, comprising administering to an individual in need thereof a therapeutically effective amount of an albumin fusion protein of the invention and/or polynucleotides encoding an albumin fusion protein of the invention. For example, fusion proteins of the invention and/or polynucleotides encoding albumin fusion proteins of the invention may be utilized in a variety of additional methods in order to therapeutically treat a cancer or tumor. Cancers which may be treated with fusion proteins of the invention and/or polynucleotides encoding albumin fusion proteins of the invention include, but are not limited to solid tumors, including prostate, lung, breast, ovarian, stomach, pancreas, larynx, esophagus, testes, liver, parotid, biliary tract, colon, rectum, cervix, uterus, endometrium, kidney, bladder, thyroid cancer; primary tumors and metastases; melanomas; glioblastoma; Kaposi's sarcoma; leiomyosarcoma; non-small cell lung cancer; colorectal cancer; advanced malignancies; and blood born tumors such as leukemias. For example, fusion proteins of the invention and/or polynucleotides encoding albumin fusion proteins of the invention may be delivered topically, in order to treat cancers such as skin cancer, head and neck tumors, breast tumors, and Kaposi's sarcoma.

[0755] Within yet other aspects, fusion proteins of the invention and/or polynucleotides encoding albumin fusion proteins of the invention may be utilized to treat superficial forms of bladder cancer by, for example, intravesical administration. Albumin fusion proteins of the invention and/or polynucleotides encoding albumin fusion proteins of the invention may be delivered directly into the tumor, or near the tumor site, via injection or a catheter. Of course, as the artisan of ordinary skill will appreciate, the appropriate mode of administration will vary according to the cancer to be treated. Other modes of delivery are discussed herein.

[0756] Albumin fusion proteins of the invention and/or polynucleotides encoding albumin fusion proteins of the invention may be useful in treating other disorders, besides cancers, which involve angiogenesis. These disorders include, but are not limited to: benign tumors, for example hemangiomas, acoustic neuromas, neurofibromas, trachomas, and pyogenic granulomas; artheroscleric plaques; ocular angiogenic diseases, for example, diabetic retinopathy, retinopathy of prematurity, macular degeneration, corneal graft rejection, neovascular glaucoma, retrolental fibroplasia, rubeosis, retinoblastoma, uvietis and Pterygia (abnormal blood vessel growth) of the eye; rheumatoid arthritis; psoriasis; delayed wound healing; endometriosis; vasculogenesis; granulations; hypertrophic scars (keloids); nonunion fractures; scleroderma; trachoma; vascular adhesions; myocardial angiogenesis; coronary collaterals; cerebral collaterals; arteriovenous malformations; ischemic limb angiogenesis; Osler-Webber Syndrome; plaque neovascularization; telangiectasia; hemophiliac joints; angiofibroma; fibromuscular dysplasia; wound granulation; Crohn's disease; and atherosclerosis.

[0757] For example, within one aspect of the present invention methods are provided for treating hypertrophic scars and keloids, comprising the step of administering albumin fusion proteins of the invention and/or polynucleotides encoding albumin fusion proteins of the invention to a hypertrophic scar or keloid.

[0758] Within one embodiment of the present invention fusion proteins of the invention and/or polynucleotides encoding albumin fusion proteins of the invention are directly injected into a hypertrophic scar or keloid, in order to prevent the progression of these lesions. This therapy is of particular value in the prophylactic treatment of conditions which are known to result in the development of hypertrophic scars and keloids (e.g., burns), and is preferably initiated after the proliferative phase has had time to progress (approximately 14 days after the initial injury), but before hypertrophic scar or keloid development. As noted above, the present invention also provides methods for treating neovascular diseases of the eye, including for example, corneal neovascularization, neovascular glaucoma, proliferative diabetic retinopathy, retrolental fibroplasia and macular degeneration.

[0759] Moreover, Ocular disorders associated with neovascularization which can be treated with the albumin fusion proteins of the invention and/or polynucleotides encoding albumin fusion proteins of the invention include, but are not limited to: neovascular glaucoma, diabetic retinopathy, retinoblastoma, retrolental fibroplasia, uveitis, retinopathy of prematurity macular degeneration, corneal graft neovascularization, as well as other eye inflammatory diseases, ocular tumors and diseases associated with choroidal or iris neovascularization. See, e.g., reviews by Waltman et al., Am. J. Ophthal. 85:704-710 (1978) and Gartner et al., Surv. Ophthal. 22:291-312 (1978).

[0760] Thus, within one aspect of the present invention methods are provided for treating neovascular diseases of the eye such as corneal neovascularization (including corneal graft neovascularization), comprising the step of administering to a patient a therapeutically effective amount of a compound (e.g., fusion proteins of the invention and/or polynucleotides encoding albumin fusion proteins of the invention) to the cornea, such that the formation of blood vessels is inhibited. Briefly, the cornea is a tissue which normally lacks blood vessels. In certain pathological conditions however, capillaries may extend into the cornea from the pericorneal vascular plexus of the limbus. When the cornea becomes vascularized, it also becomes clouded, resulting in a decline in the patient's visual acuity. Visual loss may become complete if the cornea completely opacitates. A wide variety of disorders can result in corneal neovascularization, including for example, corneal infections (e.g., trachoma, herpes simplex keratitis, leishmaniasis and onchocerciasis), immunological processes (e.g., graft rejection and Stevens-Johnson's syndrome), alkali burns, trauma, inflammation (of any cause), toxic and nutritional deficiency states, and as a complication of wearing contact lenses.

[0761] Within particularly preferred embodiments of the invention, may be prepared for topical administration in saline (combined with any of the preservatives and antimicrobial agents commonly used in ocular preparations), and administered in eyedrop form. The solution or suspension may be prepared in its pure form and administered several times daily. Alternatively, anti-angiogenic compositions, prepared as described above, may also be administered directly to the cornea. Within preferred embodiments, the anti-angiogenic composition is prepared with a muco-adhesive polymer which binds to cornea. Within further embodiments, the anti-angiogenic factors or anti-angiogenic compositions may be utilized as an adjunct to conventional steroid therapy. Topical therapy may also be useful prophylactically in corneal lesions which are known to have a high probability of inducing an angiogenic response (such as chemical burns). In these instances the treatment, likely in combination with steroids, may be instituted immediately to help prevent subsequent complications.

[0762] Within other embodiments, the compounds described above may be injected directly into the corneal stroma by an ophthalmologist under microscopic guidance. The preferred site of injection may vary with the morphology of the individual lesion, but the goal of the administration would be to place the composition at the advancing front of the vasculature (i.e., interspersed between the blood vessels and the normal cornea). In most cases this would involve perilimbic corneal injection to “protect” the cornea from the advancing blood vessels. This method may also be utilized shortly after a corneal insult in order to prophylactically prevent corneal neovascularization. In this situation the material could be injected in the perilimbic cornea interspersed between the corneal lesion and its undesired potential limbic blood supply. Such methods may also be utilized in a similar fashion to prevent capillary invasion of transplanted corneas. In a sustained-release form injections might only be required 2-3 times per year. A steroid could also be added to the injection solution to reduce inflammation resulting from the injection itself.

[0763] Within another aspect of the present invention, methods are provided for treating neovascular glaucoma, comprising the step of administering to a patient a therapeutically effective amount of an albumin fusion protein of the invention and/or polynucleotides encoding an albumin fusion protein of the invention to the eye, such that the formation of blood vessels is inhibited. In one embodiment, the compound may be administered topically to the eye in order to treat early forms of neovascular glaucoma. Within other embodiments, the compound may be implanted by injection into the region of the anterior chamber angle. Within other embodiments, the compound may also be placed in any location such that the compound is continuously released into the aqueous humor. Within another aspect of the present invention, methods are provided for treating proliferative diabetic retinopathy, comprising the step of administering to a patient a therapeutically effective amount of an albumin fusion protein of the invention and/or polynucleotides encoding an albumin fusion protein of the invention to the eyes, such that the formation of blood vessels is inhibited.

[0764] Within particularly preferred embodiments of the invention, proliferative diabetic retinopathy may be treated by injection into the aqueous humor or the vitreous, in order to increase the local concentration of the polynucleotide, polypeptide, antagonist and/or agonist in the retina. Preferably, this treatment should be initiated prior to the acquisition of severe disease requiring photocoagulation.

[0765] Within another aspect of the present invention, methods are provided for treating retrolental fibroplasia, comprising the step of administering to a patient a therapeutically effective amount of an albumin fusion protein of the invention and/or polynucleotides encoding an albumin fusion protein of the invention to the eye, such that the formation of blood vessels is inhibited. The compound may be administered topically, via intravitreous injection and/or via intraocular implants.

[0766] Additionally, disorders which can be treated with fusion proteins of the invention and/or polynucleotides encoding albumin fusion proteins of the invention include, but are not limited to, hemangioma, arthritis, psoriasis, angiofibroma, atherosclerotic plaques, delayed wound healing, granulations, hemophilic joints, hypertrophic scars, nonunion fractures, Osler-Weber syndrome, pyogenic granuloma, scleroderma, trachoma, and vascular adhesions.

[0767] Moreover, disorders and/or states, which can be treated, prevented, diagnosed, and/or prognosed with the albumin fusion proteins of the invention and/or polynucleotides encoding albumin fusion proteins of the invention of the invention include, but are not limited to, solid tumors, blood born tumors such as leukemias, tumor metastasis, Kaposi's sarcoma, benign tumors, for example hemangiomas, acoustic neuromas, neurofibromas, trachomas, and pyogenic granulomas, rheumatoid arthritis, psoriasis, ocular angiogenic diseases, for example, diabetic retinopathy, retinopathy of prematurity, macular degeneration, corneal graft rejection, neovascular glaucoma, retrolental fibroplasia, rubeosis, retinoblastoma, and uvietis, delayed wound healing, endometriosis, vascluogenesis, granulations, hypertrophic scars (keloids), nonunion fractures, scleroderma, trachoma, vascular adhesions, myocardial angiogenesis, coronary collaterals, cerebral collaterals, arteriovenous malformations, ischemic limb angiogenesis, Osler-Webber Syndrome, plaque neovascularization, telangiectasia, hemophiliac joints, angiofibroma fibromuscular dysplasia, wound granulation, Crohn's disease, atherosclerosis, birth control agent by preventing vascularization required for embryo implantation controlling menstruation, diseases that have angiogenesis as a pathologic consequence such as cat scratch disease (Rochele minalia quintosa), ulcers (Helicobacter pylori), Bartonellosis and bacillary angiomatosis.

[0768] In one aspect of the birth control method, an amount of the compound sufficient to block embryo implantation is administered before or after intercourse and fertilization have occurred, thus providing an effective method of birth control, possibly a “morning after” method. Albumin fusion proteins of the invention and/or polynucleotides encoding albumin fusion proteins of the invention may also be used in controlling menstruation or administered as either a peritoneal lavage fluid or for peritoneal implantation in the treatment of endometriosis.

[0769] Albumin fusion proteins of the invention and/or polynucleotides encoding albumin fusion proteins of the invention may be incorporated into surgical sutures in order to prevent stitch granulomas.

[0770] Albumin fusion proteins of the invention and/or polynucleotides encoding albumin fusion proteins of the invention may be utilized in a wide variety of surgical procedures. For example, within one aspect of the present invention a compositions (in the form of, for example, a spray or film) may be utilized to coat or spray an area prior to removal of a tumor, in order to isolate normal surrounding tissues from malignant tissue, and/or to prevent the spread of disease to surrounding tissues. Within other aspects of the present invention, compositions (e.g., in the form of a spray) may be delivered via endoscopic procedures in order to coat tumors, or inhibit angiogenesis in a desired locale. Within yet other aspects of the present invention, surgical meshes which have been coated with anti-angiogenic compositions of the present invention may be utilized in any procedure wherein a surgical mesh might be utilized. For example, within one embodiment of the invention a surgical mesh laden with an anti-angiogenic composition may be utilized during abdominal cancer resection surgery (e.g., subsequent to colon resection) in order to provide support to the structure, and to release an amount of the anti-angiogenic factor.

[0771] Within further aspects of the present invention, methods are provided for treating tumor excision sites, comprising administering albumin fusion proteins of the invention and/or polynucleotides encoding albumin fusion proteins of the invention to the resection margins of a tumor subsequent to excision, such that the local recurrence of cancer and the formation of new blood vessels at the site is inhibited. Within one embodiment of the invention, the anti-angiogenic compound is administered directly to the tumor excision site (e.g., applied by swabbing, brushing or otherwise coating the resection margins of the tumor with the anti-angiogenic compound). Alternatively, the anti-angiogenic compounds may be incorporated into known surgical pastes prior to administration. Within particularly preferred embodiments of the invention, the anti-angiogenic compounds are applied after hepatic resections for malignancy, and after neurosurgical operations.

[0772] Within one aspect of the present invention, fusion proteins of the invention and/or polynucleotides encoding albumin fusion proteins of the invention may be administered to the resection margin of a wide variety of tumors, including for example, breast, colon, brain and hepatic tumors. For example, within one embodiment of the invention, anti-angiogenic compounds may be administered to the site of a neurological tumor subsequent to excision, such that the formation of new blood vessels at the site are inhibited.

[0773] The albumin fusion proteins of the invention and/or polynucleotides encoding albumin fusion proteins of the invention may also be administered along with other anti-angiogenic factors. Representative examples of other anti-angiogenic factors include: Anti-Invasive Factor, retinoic acid and derivatives thereof, paclitaxel, Suramin, Tissue Inhibitor of Metalloproteinase-1, Tissue Inhibitor of Metalloproteinase-2, Plasminogen Activator Inhibitor-1, Plasminogen Activator Inhibitor-2, and various forms of the lighter “d group” transition metals.

[0774] Lighter “d group” transition metals include, for example, vanadium, molybdenum, tungsten, titanium, niobium, and tantalum species. Such transition metal species may form transition metal complexes. Suitable complexes of the above-mentioned transition metal species include oxo transition metal complexes.

[0775] Representative examples of vanadium complexes include oxo vanadium complexes such as vanadate and vanadyl complexes. Suitable vanadate complexes include metavanadate and orthovanadate complexes such as, for example, ammonium metavanadate, sodium metavanadate, and sodium orthovanadate. Suitable vanadyl complexes include, for example, vanadyl acetylacetonate and vanadyl sulfate including vanadyl sulfate hydrates such as vanadyl sulfate mono- and trihydrates.

[0776] Representative examples of tungsten and molybdenum complexes also include oxo complexes. Suitable oxo tungsten complexes include tungstate and tungsten oxide complexes. Suitable tungstate complexes include ammonium tungstate, calcium tungstate, sodium tungstate dihydrate, and tungstic acid. Suitable tungsten oxides include tungsten (IV) oxide and tungsten (VI) oxide. Suitable oxo molybdenum complexes include molybdate, molybdenum oxide, and molybdenyl complexes. Suitable molybdate complexes include ammonium molybdate and its hydrates, sodium molybdate and its hydrates, and potassium molybdate and its hydrates. Suitable molybdenum oxides include molybdenum (VI) oxide, molybdenum (VI) oxide, and molybdic acid. Suitable molybdenyl complexes include, for example, molybdenyl acetylacetonate. Other suitable tungsten and molybdenum complexes include hydroxo derivatives derived from, for example, glycerol, tartaric acid, and sugars.

[0777] A wide variety of other anti-angiogenic factors may also be utilized within the context of the present invention. Representative examples include platelet factor 4; protamine sulphate; sulphated chitin derivatives (prepared from queen crab shells), (Murata et al., Cancer Res. 51:22-26, 1991); Sulphated Polysaccharide Peptidoglycan Complex (SP-PG) (the function of this compound may be enhanced by the presence of steroids such as estrogen, and tamoxifen citrate); Staurosporine; modulators of matrix metabolism, including for example, proline analogs, cishydroxyproline, d,L-3,4-dehydroproline, Thiaproline, alpha,alpha-dipyridyl, aminopropionitrile fumarate; 4-propyl-5-(4-pyridinyl)-2(3H)-oxazolone; Methotrexate; Mitoxantrone; Heparin; Interferons; 2 Macroglobulin-serum; ChIMP-3 (Pavloff et al., J. Bio. Chem. 267:17321-17326, (1992)); Chymostatin (Tomkinson et al., Biochem J. 286:475-480, (1992)); Cyclodextrin Tetradecasulfate; Eponemycin; Camptothecin; Fumagillin (Ingber et al., Nature 348:555-557, 1990); Gold Sodium Thiomalate (“GST”; Matsubara and Ziff, J. Clin. Invest. 79:1440-1446, (1987)); anticollagenase-serum; alpha2-antiplasmin (Holmes et al., J. Biol. Chem. 262(4):1659-1664, (1987)); Bisantrene (National Cancer Institute); Lobenzarit disodium (N-(2)-carboxyphenyl-4-chloroanthronilic acid disodium or “CCA”; Takeuchi et al., Agents Actions 36:312-316, (1992)); Thalidomide; Angostatic steroid; AGM-1470; carboxynaminolmidazole; and metalloproteinase inhibitors such as BB94.

[0778] Diseases at the Cellular Level

[0779] Diseases associated with increased cell survival or the inhibition of apoptosis that could be treated, prevented, diagnosed, and/or prognosed using fusion proteins of the invention and/or polynucleotides encoding albumin fusion proteins of the invention, include cancers (such as follicular lymphomas, carcinomas with p53 mutations, and hormone-dependent tumors, including, but not limited to colon cancer, cardiac tumors, pancreatic cancer, melanoma, retinoblastoma, glioblastoma, lung cancer, intestinal cancer, testicular cancer, stomach cancer, neuroblastoma, myxoma, myoma, lymphoma, endothelioma, osteoblastoma, osteoclastoma, osteosarcoma, chondrosarcoma, adenoma, breast cancer, prostate cancer, Kaposi's sarcoma and ovarian cancer); autoimmune disorders (such as, multiple sclerosis, Sjogren's syndrome, Hashimoto's thyroiditis, biliary cirrhosis, Behcet's disease, Crohn's disease, polymyositis, systemic lupus erythematosus and immune-related glomerulonephritis and rheumatoid arthritis) and viral infections (such as herpes viruses, pox viruses and adenoviruses), inflammation, graft v. host disease, acute graft rejection, and chronic graft rejection.

[0780] In preferred embodiments, fusion proteins of the invention and/or polynucleotides encoding albumin fusion proteins of the invention are used to inhibit growth, progression, and/or metasis of cancers, in particular those listed above.

[0781] Additional diseases or conditions associated with increased cell survival that could be treated or detected by fusion proteins of the invention and/or polynucleotides encoding albumin fusion proteins of the invention include, but are not limited to, progression, and/or metastases of malignancies and related disorders such as leukemia (including acute leukemias (e.g., acute lymphocytic leukemia, acute myelocytic leukemia (including myeloblastic, promyelocytic, myelomonocytic, monocytic, and erythroleukemia)) and chronic leukemias (e.g., chronic myelocytic (granulocytic) leukemia and chronic lymphocytic leukemia)), polycythemia vera, lymphomas (e.g., Hodgkin's disease and non-Hodgkin's disease), multiple myeloma, Waldenstrom's macroglobulinemia, heavy chain disease, and solid tumors including, but not limited to, sarcomas and carcinomas such as fibrosarcoma, myxosarcoma, liposarcoma, chondrosarcoma, osteogenic sarcoma, chordoma, angiosarcoma, endotheliosarcoma, lymphangiosarcoma, lymphangioendotheliosarcoma, synovioma, mesothelioma, Ewing's tumor, leiomyosarcoma, rhabdomyosarcoma, colon carcinoma, pancreatic cancer, breast cancer, ovarian cancer, prostate cancer, squamous cell carcinoma, basal cell carcinoma, adenocarcinoma, sweat gland carcinoma, sebaceous gland carcinoma, papillary carcinoma, papillary adenocarcinomas, cystadenocarcinoma, medullary carcinoma, bronchogenic carcinoma, renal cell carcinoma, hepatoma, bile duct carcinoma, choriocarcinoma, seminoma, embryonal carcinoma, Wilm's tumor, cervical cancer, testicular tumor, lung carcinoma, small cell lung carcinoma, bladder carcinoma, epithelial carcinoma, glioma, astrocytoma, medulloblastoma, craniopharyngioma, ependymoma, pinealoma, hemangioblastoma, acoustic neuroma, oligodendroglioma, menangioma, melanoma, neuroblastoma, and retinoblastoma.

[0782] Diseases associated with increased apoptosis that could be treated, prevented, diagnosed, and/or prognesed using fusion proteins of the invention and/or polynucleotides encoding albumin fusion proteins of the invention, include, but are not limited to, AIDS; neurodegenerative disorders (such as Alzheimer's disease, Parkinson's disease, Amyotrophic lateral sclerosis, Retinitis pigmentosa, Cerebellar degeneration and brain tumor or prior associated disease); autoimmune disorders (such as, multiple sclerosis, Sjogren's syndrome, Hashimoto's thyroiditis, biliary cirrhosis, Behcet's disease, Crohn's disease, polymyositis, systemic lupus erythematosus and immune-related glomerulonephritis and rheumatoid arthritis) myelodysplastic syndromes (such as aplastic anemia), graft v. host disease, ischemic injury (such as that caused by myocardial infarction, stroke and reperfusion injury), liver injury (e.g., hepatitis related liver injury, ischemia/reperfusion injury, cholestosis (bile duct injury) and liver cancer); toxin-induced liver disease (such as that caused by alcohol), septic shock, cachexia and anorexia.

[0783] Wound Healing and Epithelial Cell Proliferation

[0784] In accordance with yet a further aspect of the present invention, there is provided a process for utilizing fusion proteins of the invention and/or polynucleotides encoding albumin fusion proteins of the invention, for therapeutic purposes, for example, to stimulate epithelial cell proliferation and basal keratinocytes for the purpose of wound healing, and to stimulate hair follicle production and healing of dermal wounds. Albumin fusion proteins of the invention and/or polynucleotides encoding albumin fusion proteins of the invention, may be clinically useful in stimulating wound healing including surgical wounds, excisional wounds, deep wounds involving damage of the dermis and epidermis, eye tissue wounds, dental tissue wounds, oral cavity wounds, diabetic ulcers, dermal ulcers, cubitus ulcers, arterial ulcers, venous stasis ulcers, burns resulting from heat exposure or chemicals, and other abnormal wound healing conditions such as uremia, malnutrition, vitamin deficiencies and complications associated with systemic treatment with steroids, radiation therapy and antineoplastic drugs and antimetabolites. Albumin fusion proteins of the invention and/or polynucleotides encoding albumin fusion proteins of the invention, could be used to promote dermal reestablishment subsequent to dermal loss

[0785] Albumin fusion proteins of the invention and/or polynucleotides encoding albumin fusion proteins of the invention, could be used to increase the adherence of skin grafts to a wound bed and to stimulate re-epithelialization from the wound bed. The following are types of grafts that fusion proteins of the invention and/or polynucleotides encoding albumin fusion proteins of the invention, could be used to increase adherence to a wound bed: autografts, artificial skin, allografts, autodermic graft, autoepdermic grafts, avacular grafts, Blair-Brown grafts, bone graft, brephoplastic grafts, cutis graft, delayed graft, dermic graft, epidermic graft, fascia graft, full thickness graft, heterologous graft, xenograft, homologous graft, hyperplastic graft, lamellar graft, mesh graft, mucosal graft, Ollier-Thiersch graft, omenpal graft, patch graft, pedicle graft, penetrating graft, split skin graft, thick split graft. Albumin fusion proteins of the invention and/or polynucleotides encoding albumin fusion proteins of the invention, can be used to promote skin strength and to improve the appearance of aged skin.

[0786] It is believed that fusion proteins of the invention and/or polynucleotides encoding albumin fusion proteins of the invention, will also produce changes in hepatocyte proliferation, and epithelial cell proliferation in the lung, breast, pancreas, stomach, small intestine, and large intestine. Albumin fusion proteins of the invention and/or polynucleotides encoding albumin fusion proteins of the invention, could promote proliferation of epithelial cells such as sebocytes, hair follicles, hepatocytes, type II pneumocytes, mucin-producing goblet cells, and other epithelial cells and their progenitors contained within the skin, lung, liver, and gastrointestinal tract. Albumin fusion proteins of the invention and/or polynucleotides encoding albumin fusion proteins of the invention, may promote proliferation of endothelial cells, keratinocytes, and basal keratinocytes.

[0787] Albumin fusion proteins of the invention and/or polynucleotides encoding albumin fusion proteins of the invention, could also be used to reduce the side effects of gut toxicity that result from radiation, chemotherapy treatments or viral infections. Albumin fusion proteins of the invention and/or polynucleotides encoding albumin fusion proteins of the invention, may have a cytoprotective effect on the small intestine mucosa. Albumin fusion proteins of the invention and/or polynucleotides encoding albumin fusion proteins of the invention, may also stimulate healing of mucositis (mouth ulcers) that result from chemotherapy and viral infections.

[0788] Albumin fusion proteins of the invention and/or polynucleotides encoding albumin fusion proteins of the invention, could further be used in full regeneration of skin in full and partial thickness skin defects, including burns, (i.e., repopulation of hair follicles, sweat glands, and sebaceous glands), treatment of other skin defects such as psoriasis. Albumin fusion proteins of the invention and/or polynucleotides encoding albumin fusion proteins of the invention, could be used to treat epidermolysis bullosa, a defect in adherence of the epidermis to the underlying dermis which results in frequent, open and painful blisters by accelerating reepithelialization of these lesions. Albumin fusion proteins of the invention and/or polynucleotides encoding albumin fusion proteins of the invention, could also be used to treat gastric and doudenal ulcers and help heal by scar formation of the mucosal lining and regeneration of glandular mucosa and duodenal mucosal lining more rapidly. Inflammatory bowel diseases, such as Crohn's disease and ulcerative colitis, are diseases which result in destruction of the mucosal surface of the small or large intestine, respectively. Thus, fusion proteins of the invention and/or polynucleotides encoding albumin fusion proteins of the invention, could be used to promote the resurfacing of the mucosal surface to aid more rapid healing and to prevent progression of inflammatory bowel disease. Treatment with fusion proteins of the invention and/or polynucleotides encoding albumin fusion proteins of the invention, is expected to have a significant effect on the production of mucus throughout the gastrointestinal tract and could be used to protect the intestinal mucosa from injurious substances that are ingested or following surgery. Albumin fusion proteins of the invention and/or polynucleotides encoding albumin fusion proteins of the invention, could be used to treat diseases associate with the under expression.

[0789] Moreover, fusion proteins of the invention and/or polynucleotides encoding albumin fusion proteins of the invention, could be used to prevent and heal damage to the lungs due to various pathological states. Albumin fusion proteins of the invention and/or polynucleotides encoding albumin fusion proteins of the invention, which could stimulate proliferation and differentiation and promote the repair of alveoli and brochiolar epithelium to prevent or treat acute or chronic lung damage. For example, emphysema, which results in the progressive loss of aveoli, and inhalation injuries, i.e., resulting from smoke inhalation and burns, that cause necrosis of the bronchiolar epithelium and alveoli could be effectively treated using polynucleotides or polypeptides, agonists or antagonists of the present invention. Also fusion proteins of the invention and/or polynucleotides encoding albumin fusion proteins of the invention, could be used to stimulate the proliferation of and differentiation of type II pneumocytes, which may help treat or prevent disease such as hyaline membrane diseases, such as infant respiratory distress syndrome and bronchopulmonary displasia, in premature infants.

[0790] Albumin fusion proteins of the invention and/or polynucleotides encoding albumin fusion proteins of the invention, could stimulate the proliferation and differentiation of hepatocytes and, thus, could be used to alleviate or treat liver diseases and pathologies such as fulminant liver failure caused by cirrhosis, liver damage caused by viral hepatitis and toxic substances (i.e., acetaminophen, carbon tetraholoride and other hepatotoxins known in the art).

[0791] In addition, fusion proteins of the invention and/or polynucleotides encoding albumin fusion proteins of the invention, could be used treat or prevent the onset of diabetes mellitus. In patients with newly diagnosed Types I and II diabetes, where some islet cell function remains, fusion proteins of the invention and/or polynucleotides encoding albumin fusion proteins of the invention, could be used to maintain the islet function so as to alleviate, delay or prevent permanent manifestation of the disease. Also, fusion proteins of the invention and/or polynucleotides encoding albumin fusion proteins of the invention, could be used as an auxiliary in islet cell transplantation to improve or promote islet cell function.

[0792] Neural Activity and Neurological Diseases

[0793] The albumin fusion proteins of the invention and/or polynucleotides encoding albumin fusion proteins of the invention may be used for the diagnosis and/or treatment of diseases, disorders, damage or injury of the brain and/or nervous system. Nervous system disorders that can be treated with the compositions of the invention (e.g., fusion proteins of the invention and/or polynucleotides encoding albumin fusion proteins of the invention), include, but are not limited to, nervous system injuries, and diseases or disorders which result in either a disconnection of axons, a diminution or degeneration of neurons, or demyelination. Nervous system lesions which may be treated in a patient (including human and non-human mammalian patients) according to the methods of the invention, include but are not limited to, the following lesions of either the central (including spinal cord, brain) or peripheral nervous systems: (1) ischemic lesions, in which a lack of oxygen in a portion of the nervous system results in neuronal injury or death, including cerebral infarction or ischemia, or spinal cord infarction or ischemia; (2) traumatic lesions, including lesions caused by physical injury or associated with surgery, for example, lesions which sever a portion of the nervous system, or compression injuries; (3) malignant lesions, in which a portion of the nervous system is destroyed or injured by malignant tissue which is either a nervous system associated malignancy or a malignancy derived from non-nervous system tissue; (4) infectious lesions, in which a portion of the nervous system is destroyed or injured as a result of infection, for example, by an abscess or associated with infection by human immunodeficiency virus, herpes zoster, or herpes simplex virus or with Lyme disease, tuberculosis, or syphilis; (5) degenerative lesions, in which a portion of the nervous system is destroyed or injured as a result of a degenerative process including but not limited to, degeneration associated with Parkinson's disease, Alzheimer's disease, Huntington's chorea, or amyotrophic lateral sclerosis (ALS); (6) lesions associated with nutritional diseases or disorders, in which a portion of the nervous system is destroyed or injured by a nutritional disorder or disorder of metabolism including, but not limited to, vitamin B12 deficiency, folic acid deficiency, Wernicke disease, tobacco-alcohol amblyopia, Marchiafava-Bignami disease (primary degeneration of the corpus callosum), and alcoholic cerebellar degeneration; (7) neurological lesions associated with systemic diseases including, but not limited to, diabetes (diabetic neuropathy, Bell's palsy), systemic lupus erythematosus, carcinoma, or sarcoidosis; (8) lesions caused by toxic substances including alcohol, lead, or particular neurotoxins; and (9) demyelinated lesions in which a portion of the nervous system is destroyed or injured by a demyelinating disease including, but not limited to, multiple sclerosis, human immunodeficiency virus-associated myelopathy, transverse myelopathy or various etiologies, progressive multifocal leukoencephalopathy, and central pontine myelinolysis.

[0794] In one embodiment, the albumin fusion proteins of the invention and/or polynucleotides encoding albumin fusion proteins of the invention are used to protect neural cells from the damaging effects of hypoxia. In a further preferred embodiment, the albumin fusion proteins of the invention and/or polynucleotides encoding albumin fusion proteins of the invention are used to protect neural cells from the damaging effects of cerebral hypoxia. According to this embodiment, the compositions of the invention are used to treat or prevent neural cell injury associated with cerebral hypoxia. In one non-exclusive aspect of this embodiment, the albumin fusion proteins of the invention and/or polynucleotides encoding albumin fusion proteins of the invention, are used to treat or prevent neural cell injury associated with cerebral ischemia. In another non-exclusive aspect of this embodiment, the albumin fusion proteins of the invention and/or polynucleotides encoding albumin fusion proteins of the invention are used to treat or prevent neural cell injury associated with cerebral infarction.

[0795] In another preferred embodiment, albumin fusion proteins of the invention and/or polynucleotides encoding albumin fusion proteins of the invention are used to treat or prevent neural cell injury associated with a stroke. In a specific embodiment, albumin fusion proteins of the invention and/or polynucleotides encoding albumin fusion proteins of the invention are used to treat or prevent cerebral neural cell injury associated with a stroke.

[0796] In another preferred embodiment, albumin fusion proteins of the invention and/or polynucleotides encoding albumin fusion proteins of the invention are used to treat or prevent neural cell injury associated with a heart attack. In a specific embodiment, albumin fusion proteins of the invention and/or polynucleotides encoding albumin fusion proteins of the invention are used to treat or prevent cerebral neural cell injury associated with a heart attack.

[0797] The compositions of the invention which are useful for treating or preventing a nervous system disorder may be selected by testing for biological activity in promoting the survival or differentiation of neurons. For example, and not by way of limitation, compositions of the invention which elicit any of the following effects may be useful according to the invention: (1) increased survival time of neurons in culture either in the presence or absence of hypoxia or hypoxic conditions; (2) increased sprouting of neurons in culture or in vivo; (3) increased production of a neuron-associated molecule in culture or in vivo, e.g., choline acetyltransferase or acetylcholinesterase with respect to motor neurons; or (4) decreased symptoms of neuron dysfunction in vivo. Such effects may be measured by any method known in the art. In preferred, non-limiting embodiments, increased survival of neurons may routinely be measured using a method set forth herein or otherwise known in the art, such as, for example, in Zhang et al., Proc Natl Acad Sci USA 97:3637-42 (2000) or in Arakawa et al., J. Neurosci., 10:3507-15 (1990); increased sprouting of neurons may be detected by methods known in the art, such as, for example, the methods set forth in Pestronk et al., Exp. Neurol., 70:65-82 (1980), or Brown et al., Ann. Rev. Neurosci., 4:17-42 (1981); increased production of neuron-associated molecules may be measured by bioassay, enzymatic assay, antibody binding, Northern blot assay, etc., using techniques known in the art and depending on the molecule to be measured; and motor neuron dysfunction may be measured by assessing the physical manifestation of motor neuron disorder, e.g., weakness, motor neuron conduction velocity, or functional disability.

[0798] In specific embodiments, motor neuron disorders that may be treated according to the invention include, but are not limited to, disorders such as infarction, infection, exposure to toxin, trauma, surgical damage, degenerative disease or malignancy that may affect motor neurons as well as other components of the nervous system, as well as disorders that selectively affect neurons such as amyotrophic lateral sclerosis, and including, but not limited to, progressive spinal muscular atrophy, progressive bulbar palsy, primary lateral sclerosis, infantile and juvenile muscular atrophy, progressive bulbar paralysis of childhood (Fazio-Londe syndrome), poliomyelitis and the post polio syndrome, and Hereditary Motorsensory Neuropathy (Charcot-Marie-Tooth Disease).

[0799] Further, fusion proteins of the invention and/or polynucleotides encoding albumin fusion proteins of the invention may play a role in neuronal survival; synapse formation; conductance; neural differentiation, etc. Thus, compositions of the invention (including fusion proteins of the invention and/or polynucleotides encoding albumin fusion proteins of the invention) may be used to diagnose and/or treat or prevent diseases or disorders associated with these roles, including, but not limited to, learning and/or cognition disorders. The compositions of the invention may also be useful in the treatment or prevention of neurodegenerative disease states and/or behavioural disorders. Such neurodegenerative disease states and/or behavioral disorders include, but are not limited to, Alzheimer's Disease, Parkinson's Disease, Huntington's Disease, Tourette Syndrome, schizophrenia, mania, dementia, paranoia, obsessive compulsive disorder, panic disorder, learning disabilities, ALS, psychoses, autism, and altered behaviors, including disorders in feeding, sleep patterns, balance, and perception. In addition, compositions of the invention may also play a role in the treatment, prevention and/or detection of developmental disorders associated with the developing embryo, or sexually-linked disorders.

[0800] Additionally, fusion proteins of the invention and/or polynucleotides encoding albumin fusion proteins of the invention, may be useful in protecting neural cells from diseases, damage, disorders, or injury, associated with cerebrovascular disorders including, but not limited to, carotid artery diseases (e.g., carotid artery thrombosis, carotid stenosis, or Moyamoya Disease), cerebral amyloid angiopathy, cerebral aneurysm, cerebral anoxia, cerebral arteriosclerosis, cerebral arteriovenous malformations, cerebral artery diseases, cerebral embolism and thrombosis (e.g., carotid artery thrombosis, sinus thrombosis, or Wallenberg's Syndrome), cerebral hemorrhage (e.g., epidural or subdural hematoma, or subarachnoid hemorrhage), cerebral infarction, cerebral ischemia (e.g., transient cerebral ischemia, Subclavian Steal Syndrome, or vertebrobasilar insufficiency), vascular dementia (e.g., multi-infarct), leukomalacia, periventricular, and vascular headache (e.g., cluster headache or migraines).

[0801] In accordance with yet a further aspect of the present invention, there is provided a process for utilizing fusion proteins of the invention and/or polynucleotides encoding albumin fusion proteins of the invention, for therapeutic purposes, for example, to stimulate neurological cell proliferation and/or differentiation. Therefore, fusion proteins of the invention and/or polynucleotides encoding albumin fusion proteins of the invention may be used to treat and/or detect neurologic diseases. Moreover, fusion proteins of the invention and/or polynucleotides encoding albumin fusion proteins of the invention, can be used as a marker or detector of a particular nervous system disease or disorder.

[0802] Examples of neurologic diseases which can be treated or detected with fusion proteins of the invention and/or polynucleotides encoding albumin fusion proteins of the invention include, brain diseases, such as metabolic brain diseases which includes phenylketonuria such as maternal phenylketonuria, pyruvate carboxylase deficiency, pyruvate dehydrogenase complex deficiency, Wernicke's Encephalopathy, brain edema, brain neoplasms such as cerebellar neoplasms which include infratentorial neoplasms, cerebral ventricle neoplasms such as choroid plexus neoplasms, hypothalamic neoplasms, supratentorial neoplasms, canavan disease, cerebellar diseases such as cerebellar ataxia which include spinocerebellar degeneration such as ataxia telangiectasia, cerebellar dyssynergia, Friederich's Ataxia, Machado-Joseph Disease, olivopontocerebellar atrophy, cerebellar neoplasms such as infratentorial neoplasms, diffuse cerebral sclerosis such as encephalitis periaxialis, globoid cell leukodystrophy, metachromatic leukodystrophy and subacute sclerosing panencephalitis.

[0803] Additional neurologic diseases which can be treated or detected with fusion proteins of the invention and/or polynucleotides encoding albumin fusion proteins of the invention include cerebrovascular disorders (such as carotid artery diseases which include carotid artery thrombosis, carotid stenosis and Moyamoya Disease), cerebral amyloid angiopathy, cerebral aneurysm, cerebral anoxia, cerebral arteriosclerosis, cerebral arteriovenous malformations, cerebral artery diseases, cerebral embolism and thrombosis such as carotid artery thrombosis, sinus thrombosis and Wallenberg's Syndrome, cerebral hemorrhage such as epidural hematoma, subdural hematoma and subarachnoid hemorrhage, cerebral infarction, cerebral ischemia such as transient cerebral ischemia, Subclavian Steal Syndrome and vertebrobasilar insufficiency, vascular dementia such as multi-infarct dementia, periventricular leukomalacia, vascular headache such as cluster headache and migraine.

[0804] Additional neurologic diseases which can be treated or detected with fusion proteins of the invention and/or polynucleotides encoding albumin fusion proteins of the invention include dementia such as AIDS Dementia Complex, presenile dementia such as Alzheimer's Disease and Creutzfeldt-Jakob Syndrome, senile dementia such as Alzheimer's Disease and progressive supranuclear palsy, vascular dementia such as multi-infarct dementia, encephalitis which include encephalitis periaxialis, viral encephalitis such as epidemic encephalitis, Japanese Encephalitis, St. Louis Encephalitis, tick-borne encephalitis and West Nile Fever, acute disseminated encephalomyelitis, meningoencephalitis such as uveomeningoencephalitic syndrome, Postencephalitic Parkinson Disease and subacute sclerosing panencephalitis, encephalomalacia such as periventricular leukomalacia, epilepsy such as generalized epilepsy which includes infantile spasms, absence epilepsy, myoclonic epilepsy which includes MERRF Syndrome, tonic-clonic epilepsy, partial epilepsy such as complex partial epilepsy, frontal lobe epilepsy and temporal lobe epilepsy, post-traumatic epilepsy, status epilepticus such as Epilepsia Partialis Continua, and Hallervorden-Spatz Syndrome.

[0805] Additional neurologic diseases which can be treated or detected with fusion proteins of the invention and/or polynucleotides encoding albumin fusion proteins of the invention include hydrocephalus such as Dandy-Walker Syndrome and normal pressure hydrocephalus, hypothalamic diseases such as hypothalamic neoplasms, cerebral malaria, narcolepsy which includes cataplexy, bulbar poliomyelitis, cerebri pseudotumor, Rett Syndrome, Reye's Syndrome, thalamic diseases, cerebral toxoplasmosis, intracranial tuberculoma and Zellweger Syndrome, central nervous system infections such as AIDS Dementia Complex, Brain Abscess, subdural empyema, encephalomyelitis such as Equine Encephalomyelitis, Venezuelan Equine Encephalomyelitis, Necrotizing Hemorrhagic Encephalomyelitis, Visna, and cerebral malaria.

[0806] Additional neurologic diseases which can be treated or detected with fusion proteins of the invention and/or polynucleotides encoding albumin fusion proteins of the invention include meningitis such as arachnoiditis, aseptic meningtitis such as viral meningtitis which includes lymphocytic choriomeningitis, Bacterial meningtitis which includes Haemophilus Meningtitis, Listeria Meningtitis, Meningococcal Meningtitis such as Waterhouse-Friderichsen Syndrome, Pneumococcal Meningtitis and meningeal tuberculosis, fungal meningitis such as Cryptococcal Meningtitis, subdural effusion, meningoencephalitis such as uvemeningoencephalitic syndrome, myelitis such as transverse myelitis, neurosyphilis such as tabes dorsalis, poliomyelitis which includes bulbar poliomyelitis and postpoliomyelitis syndrome, prion diseases (such as Creutzfeldt-Jakob Syndrome, Bovine Spongiform Encephalopathy, Gerstmann-Straussler Syndrome, Kuru, Scrapie), and cerebral toxoplasmosis.

[0807] Additional neurologic diseases which can be treated or detected with fusion proteins of the invention and/or polynucleotides encoding albumin fusion proteins of the invention include central nervous system neoplasms such as brain neoplasms that include cerebellar neoplasms such as infratentorial neoplasms, cerebral ventricle neoplasms such as choroid plexus neoplasms, hypothalamic neoplasms and supratentorial neoplasms, meningeal neoplasms, spinal cord neoplasms which include epidural neoplasms, demyelinating diseases such as Canavan Diseases, diffuse cerebral sceloris which includes adrenoleukodystrophy, encephalitis periaxialis, globoid cell leukodystrophy, diffuse cerebral sclerosis such as metachromatic leukodystrophy, allergic encephalomyelitis, necrotizing hemorrhagic encephalomyelitis, progressive multifocal leukoencephalopathy, multiple sclerosis, central pontine myelinolysis, transverse myelitis, neuromyelitis optica, Scrapie, Swayback, Chronic Fatigue Syndrome, Visna, High Pressure Nervous Syndrome, Meningism, spinal cord diseases such as amyotonia congenita, amyotrophic lateral sclerosis, spinal muscular atrophy such as Werdnig-Hoffmann Disease, spinal cord compression, spinal cord neoplasms such as epidural neoplasms, syringomyelia, Tabes Dorsalis, Stiff-Man Syndrome, mental retardation such as Angelman Syndrome, Cri-du-Chat Syndrome, De Lange's Syndrome, Down Syndrome, Gangliosidoses such as gangliosidoses G(M1), Sandhoff Disease, Tay-Sachs Disease, Hartnup Disease, homocystinuria, Laurence-Moon-Biedl Syndrome, Lesch-Nyhan Syndrome, Maple Syrup Urine Disease, mucolipidosis such as fucosidosis, neuronal ceroid-lipofuscinosis, oculocerebrorenal syndrome, phenylketonuria such as maternal phenylketonuria, Prader-Willi Syndrome, Rett Syndrome, Rubinstein-Taybi Syndrome, Tuberous Sclerosis, WAGR Syndrome, nervous system abnormalities such as holoprosencephaly, neural tube defects such as anencephaly which includes hydrangencephaly, Arnold-Chairi Deformity, encephalocele, meningocele, meningomyelocele, spinal dysraphism such as spina bifida cystica and spina bifida occulta.

[0808] Additional neurologic diseases which can be treated or detected with fusion proteins of the invention and/or polynucleotides encoding albumin fusion proteins of the invention include hereditary motor and sensory neuropathies which include Charcot-Marie Disease, Hereditary optic atrophy, Refsum's Disease, hereditary spastic paraplegia, Werdnig-Hoffmann Disease, Hereditary Sensory and Autonomic Neuropathies such as Congenital Analgesia and Familial Dysautonomia, Neurologic manifestations (such as agnosia that include Gerstmann's Syndrome, Amnesia such as retrograde amnesia, apraxia, neurogenic bladder, cataplexy, communicative disorders such as hearing disorders that includes deafness, partial hearing loss, loudness recruitment and tinnitus, language disorders such as aphasia which include agraphia, anomia, broca aphasia, and Wernicke Aphasia, Dyslexia such as Acquired Dyslexia, language development disorders, speech disorders such as aphasia which includes anomia, broca aphasia and Wernicke Aphasia, articulation disorders, communicative disorders such as speech disorders which include dysarthria, echolalia, mutism and stuttering, voice disorders such as aphonia and hoarseness, decerebrate state, delirium, fasciculation, hallucinations, meningism, movement disorders such as angelman syndrome, ataxia, athetosis, chorea, dystonia, hypokinesia, muscle hypotonia, myoclonus, tic, torticollis and tremor, muscle hypertonia such as muscle rigidity such as stiff-man syndrome, muscle spasticity, paralysis such as facial paralysis which includes Herpes Zoster Oticus, Gastroparesis, Hemiplegia, opthalmoplegia such as diplopia, Duane's Syndrome, Horner's Syndrome, Chronic progressive external opthalmoplegia such as Kearns Syndrome, Bulbar Paralysis, Tropical Spastic Paraparesis, Paraplegia such as Brown-Sequard Syndrome, quadriplegia, respiratory paralysis and vocal cord paralysis, paresis, phantom limb, taste disorders such as ageusia and dysgeusia, vision disorders such as amblyopia, blindness, color vision defects, diplopia, hemianopsia, scotoma and subnormal vision, sleep disorders such as hypersomnia which includes Kleine-Levin Syndrome, insomnia, and somnambulism, spasm such as trismus, unconsciousness such as coma, persistent vegetative state and syncope and vertigo, neuromuscular diseases such as amyotonia congenita, amyotrophic lateral sclerosis, Lambert-Eaton Myasthenic Syndrome, motor neuron disease, muscular atrophy such as spinal muscular atrophy, Charcot-Marie Disease and Werdnig-Hoffmann Disease, Postpoliomyelitis Syndrome, Muscular Dystrophy, Myasthenia Gravis, Myotonia Atrophica, Myotonia Confenita, Nemaline Myopathy, Familial Periodic Paralysis, Multiplex Paramyloclonus, Tropical Spastic Paraparesis and Stiff-Man Syndrome, peripheral nervous system diseases such as acrodynia, amyloid neuropathies, autonomic nervous system diseases such as Adie's Syndrome, Barre-Lieou Syndrome, Familial Dysautonomia, Horner's Syndrome, Reflex Sympathetic Dystrophy and Shy-Drager Syndrome, Cranial Nerve Diseases such as Acoustic Nerve Diseases such as Acoustic Neuroma which includes Neurofibromatosis 2, Facial Nerve Diseases such as Facial Neuralgia, Melkersson-Rosenthal Syndrome, ocular motility disorders which includes amblyopia, nystagmus, oculomotor nerve paralysis, opthalmoplegia such as Duane's Syndrome, Horner's Syndrome, Chronic Progressive External Opthalmoplegia which includes Kearns Syndrome, Strabismus such as Esotropia and Exotropia, Oculomotor Nerve Paralysis, Optic Nerve Diseases such as Optic Atrophy which includes Hereditary Optic Atrophy, Optic Disk Drusen, Optic Neuritis such as Neuromyelitis Optica, Papilledema, Trigeminal Neuralgia, Vocal Cord Paralysis, Demyelinating Diseases such as Neuromyelitis Optica and Swayback, and Diabetic neuropathies such as diabetic foot.

[0809] Additional neurologic diseases which can be treated or detected with fusion proteins of the invention and/or polynucleotides encoding albumin fusion proteins of the invention include nerve compression syndromes such as carpal tunnel syndrome, tarsal tunnel syndrome, thoracic outlet syndrome such as cervical rib syndrome, ulnar nerve compression syndrome, neuralgia such as causalgia, cervico-brachial neuralgia, facial neuralgia and trigeminal neuralgia, neuritis such as experimental allergic neuritis, optic neuritis, polyneuritis, polyradiculoneuritis and radiculities such as polyradiculitis, hereditary motor and sensory neuropathies such as Charcot-Marie Disease, Hereditary Optic Atrophy, Refsum's Disease, Hereditary Spastic Paraplegia and Werdnig-Hoffmann Disease, Hereditary Sensory and Autonomic Neuropathies which include Congenital Analgesia and Familial Dysautonomia, POEMS Syndrome, Sciatica, Gustatory Sweating and Tetany).

[0810] Endocrine Disorders

[0811] Albumin fusion proteins of the invention and/or polynucleotides encoding albumin fusion proteins of the invention, may be used to treat, prevent, diagnose, and/or prognose disorders and/or diseases related to hormone imbalance, and/or disorders or diseases of the endocrine system.

[0812] Hormones secreted by the glands of the endocrine system control physical growth, sexual function, metabolism, and other functions. Disorders may be classified in two ways: disturbances in the production of hormones, and the inability of tissues to respond to hormones. The etiology of these hormone imbalance or endocrine system diseases, disorders or conditions may be genetic, somatic, such as cancer and some autoimmune diseases, acquired (e.g., by chemotherapy, injury or toxins), or infectious. Moreover, fusion proteins of the invention and/or polynucleotides encoding albumin fusion proteins of the invention can be used as a marker or detector of a particular disease or disorder related to the endocrine system and/or hormone imbalance.

[0813] Endocrine system and/or hormone imbalance and/or diseases encompass disorders of uterine motility including, but not limited to: complications with pregnancy and labor (e.g., pre-term labor, post-term pregnancy, spontaneous abortion, and slow or stopped labor); and disorders and/or diseases of the menstrual cycle (e.g., dysmenorrhea and endometriosis).

[0814] Endocrine system and/or hormone imbalance disorders and/or diseases include disorders and/or diseases of the pancreas, such as, for example, diabetes mellitus, diabetes insipidus, congenital pancreatic agenesis, pheochromocytoma—islet cell tumor syndrome; disorders and/or diseases of the adrenal glands such as, for example, Addison's Disease, corticosteroid deficiency, virilizing disease, hirsutism, Cushing's Syndrome, hyperaldosteronism, pheochromocytoma; disorders and/or diseases of the pituitary gland, such as, for example, hyperpituitarism, hypopituitarism, pituitary dwarfism, pituitary adenoma, panhypopituitarism, acromegaly, gigantism; disorders and/or diseases of the thyroid, including but not limited to, hyperthyroidism, hypothyroidism, Plummer's disease, Graves' disease (toxic diffuse goiter), toxic nodular goiter, thyroiditis (Hashimoto's thyroiditis, subacute granulomatous thyroiditis, and silent lymphocytic thyroiditis), Pendred's syndrome, myxedema, cretinism, thyrotoxicosis, thyroid hormone coupling defect, thymic aplasia, Hurthle cell tumours of the thyroid, thyroid cancer, thyroid carcinoma, Medullary thyroid carcinoma; disorders and/or diseases of the parathyroid, such as, for example, hyperparathyroidism, hypoparathyroidism; disorders and/or diseases of the hypothalamus.

[0815] In addition, endocrine system and/or hormone imbalance disorders and/or diseases may also include disorders and/or diseases of the testes or ovaries, including cancer. Other disorders and/or diseases of the testes or ovaries further include, for example, ovarian cancer, polycystic ovary syndrome, Klinefelter's syndrome, vanishing testes syndrome (bilateral anorchia), congenital absence of Leydig's cells, cryptorchidism, Noonan's syndrome, myotonic dystrophy, capillary haemangioma of the testis (benign), neoplasias of the testis and neo-testis.

[0816] Moreover, endocrine system and/or hormone imbalance disorders and/or diseases may also include disorders and/or diseases such as, for example, polyglandular deficiency syndromes, pheochromocytoma, neuroblastoma, multiple Endocrine neoplasia, and disorders and/or cancers of endocrine tissues.

[0817] In another embodiment, albumin fusion proteins of the invention and/or polynucleotides encoding albumin fusion proteins of the invention, may be used to diagnose, prognose, prevent, and/or treat endocrine diseases and/or disorders associated with the tissue(s) in which the Therapeutic protein corresponding to the Therapeutic protein portion of the albumin protein of the invention is expressed,

[0818] Reproductive System Disorders

[0819] The albumin fusion proteins of the invention and/or polynucleotides encoding albumin fusion proteins of the invention may be used for the diagnosis, treatment, or prevention of diseases and/or disorders of the reproductive system. Reproductive system disorders that can be treated by the compositions of the invention, include, but are not limited to, reproductive system injuries, infections, neoplastic disorders, congenital defects, and diseases or disorders which result in infertility, complications with pregnancy, labor, or parturition, and postpartum difficulties.

[0820] Reproductive system disorders and/or diseases include diseases and/or disorders of the testes, including testicular atrophy, testicular feminization, cryptorchism (unilateral and bilateral), anorchia, ectopic testis, epididymitis and orchitis (typically resulting from infections such as, for example, gonorrhea, mumps, tuberculosis, and syphilis), testicular torsion, vasitis nodosa, germ cell tumors (e.g., seminomas, embryonal cell carcinomas, teratocarcinomas, choriocarcinomas, yolk sac tumors, and teratomas), stromal tumors (e.g., Leydig cell tumors), hydrocele, hematocele, varicocele, spermatocele, inguinal hernia, and disorders of sperm production (e.g., immotile cilia syndrome, aspermia, asthenozoospermia, azoospermia, oligospermia, and teratozoospermia).

[0821] Reproductive system disorders also include disorders of the prostate gland, such as acute non-bacterial prostatitis, chronic non-bacterial prostatitis, acute bacterial prostatitis, chronic bacterial prostatitis, prostatodystonia, prostatosis, granulomatous prostatitis, malacoplakia, benign prostatic hypertrophy or hyperplasia, and prostate neoplastic disorders, including adenocarcinomas, transitional cell carcinomas, ductal carcinomas, and squamous cell carcinomas.

[0822] Additionally, the compositions of the invention may be useful in the diagnosis, treatment, and/or prevention of disorders or diseases of the penis and urethra, including inflammatory disorders, such as balanoposthitis, balanitis xerotica obliterans, phimosis, paraphimosis, syphilis, herpes simplex virus, gonorrhea, non-gonococcal urethritis, chlamydia, mycoplasma, trichomonas, HIV, AIDS, Reiter's syndrome, condyloma acuminatum, condyloma latum, and pearly penile papules; urethral abnormalities, such as hypospadias, epispadias, and phimosis; premalignant lesions, including Erythroplasia of Queyrat, Bowen's disease, Bowenoid paplosis, giant condyloma of Buscke-Lowenstein, and varrucous carcinoma; penile cancers, including squamous cell carcinomas, carcinoma in situ, verrucous carcinoma, and disseminated penile carcinoma; urethral neoplastic disorders, including penile urethral carcinoma, bulbomembranous urethral carcinoma, and prostatic urethral carcinoma; and erectile disorders, such as priapism, Peyronie's disease, erectile dysfunction, and impotence.

[0823] Moreover, diseases and/or disorders of the vas deferens include vasculititis and CBAVD (congenital bilateral absence of the vas deferens); additionally, the albumin fusion proteins of the invention and/or polynucleotides encoding albumin fusion proteins of the invention may be used in the diagnosis, treatment, and/or prevention of diseases and/or disorders of the seminal vesicles, including hydatid disease, congenital chloride diarrhea, and polycystic kidney disease.

[0824] Other disorders and/or diseases of the male reproductive system include, for example, Klinefelter's syndrome, Young's syndrome, premature ejaculation, diabetes mellitus, cystic fibrosis, Kartagener's syndrome, high fever, multiple sclerosis, and gynecomastia.

[0825] Further, the polynucleotides, fusion proteins of the invention and/or polynucleotides encoding albumin fusion proteins of the invention may be used in the diagnosis, treatment, and/or prevention of diseases and/or disorders of the vagina and vulva, including bacterial vaginosis, candida vaginitis, herpes simplex virus, chancroid, granuloma inguinale, lymphogranuloma venereum, scabies, human papillomavirus, vaginal trauma, vulvar trauma, adenosis, chlamydia vaginitis, gonorrhea, trichomonas vaginitis, condyloma acuminatum, syphilis, molluscum contagiosum, atrophic vaginitis, Paget's disease, lichen sclerosus, lichen planus, vulvodynia, toxic shock syndrome, vaginismus, vulvovaginitis, vulvar vestibulitis, and neoplastic disorders, such as squamous cell hyperplasia, clear cell carcinoma, basal cell carcinoma, melanomas, cancer of Bartholin's gland, and vulvar intraepithelial neoplasia.

[0826] Disorders and/or diseases of the uterus include dysmenorrhea, retroverted uterus, endometriosis, fibroids, adenomyosis, anovulatory bleeding, amenorrhea, Cushing's syndrome, hydatidiform moles, Asherman's syndrome, premature menopause, precocious puberty, uterine polyps, dysfunctional uterine bleeding (e.g., due to aberrant hormonal signals), and neoplastic disorders, such as adenocarcinomas, keiomyosarcomas, and sarcomas. Additionally, the albumin fusion proteins of the invention and/or polynucleotides encoding albumin fusion proteins of the invention may be useful as a marker or detector of, as well as in the diagnosis, treatment, and/or prevention of congenital uterine abnormalities, such as bicornuate uterus, septate uterus, simple unicornuate uterus, unicornuate uterus with a noncavitary rudimentary horn, unicornuate uterus with a non-communicating cavitary rudimentary horn, unicornuate uterus with a communicating cavitary horn, arcuate uterus, uterine didelfus, and T-shaped uterus.

[0827] Ovarian diseases and/or disorders include anovulation, polycystic ovary syndrome (Stein-Leventhal syndrome), ovarian cysts, ovarian hypofunction, ovarian insensitivity to gonadotropins, ovarian overproduction of androgens, right ovarian vein syndrome, amenorrhea, hirutism, and ovarian cancer (including, but not limited to, primary and secondary cancerous growth, Sertoli-Leydig tumors, endometriod carcinoma of the ovary, ovarian papillary serous adenocarcinoma, ovarian mucinous adenocarcinoma, and Ovarian Krukenberg tumors).

[0828] Cervical diseases and/or disorders include cervicitis, chronic cervicitis, mucopurulent cervicitis, cervical dysplasia, cervical polyps, Nabothian cysts, cervical erosion, cervical incompetence, and cervical neoplasms (including, for example, cervical carcinoma, squamous metaplasia, squamous cell carcinoma, adenosquamous cell neoplasia, and columnar cell neoplasia).

[0829] Additionally, diseases and/or disorders of the reproductive system include disorders and/or diseases of pregnancy, including miscarriage and stillbirth, such as early abortion, late abortion, spontaneous abortion, induced abortion, therapeutic abortion, threatened abortion, missed abortion, incomplete abortion, complete abortion, habitual abortion, missed abortion, and septic abortion; ectopic pregnancy, anemia, Rh incompatibility, vaginal bleeding during pregnancy, gestational diabetes, intrauterine growth retardation, polyhydramnios, HELLP syndrome, abruptio placentae, placenta previa, hyperemesis, preeclampsia, eclampsia, herpes gestationis, and urticaria of pregnancy. Additionally, the albumin fusion proteins of the invention and/or polynucleotides encoding albumin fusion proteins of the invention may be used in the diagnosis, treatment, and/or prevention of diseases that can complicate pregnancy, including heart disease, heart failure, rheumatic heart disease, congenital heart disease, mitral valve prolapse, high blood pressure, anemia, kidney disease, infectious disease (e.g., rubella, cytomegalovirus, toxoplasmosis, infectious hepatitis, chlamydia, HIV, AIDS, and genital herpes), diabetes mellitus, Graves' disease, thyroiditis, hypothyroidism, Hashimoto's thyroiditis, chronic active hepatitis, cirrhosis of the liver, primary biliary cirrhosis, asthma, systemic lupus eryematosis, rheumatoid arthritis, myasthenia gravis, idiopathic thrombocytopenic purpura, appendicitis, ovarian cysts, gallbladder disorders, and obstruction of the intestine.

[0830] Complications associated with labor and parturition include premature rupture of the membranes, pre-term labor, post-term pregnancy, postmaturity, labor that progresses too slowly, fetal distress (e.g., abnormal heart rate (fetal or maternal), breathing problems, and abnormal fetal position), shoulder dystocia, prolapsed umbilical cord, amniotic fluid embolism, and aberrant uterine bleeding.

[0831] Further, diseases and/or disorders of the postdelivery period, including endometritis, myometritis, parametritis, peritonitis, pelvic thrombophlebitis, pulmonary embolism, endotoxemia, pyelonephritis, saphenous thrombophlebitis, mastitis, cystitis, postpartum hemorrhage, and inverted uterus.

[0832] Other disorders and/or diseases of the female reproductive system that may be diagnosed, treated, and/or prevented by the albumin fusion proteins of the invention and/or polynucleotides encoding albumin fusion proteins of the invention include, for example, Turner's syndrome, pseudohermaphroditism, premenstrual syndrome, pelvic inflammatory disease, pelvic congestion (vascular engorgement), frigidity, anorgasmia, dyspareunia, ruptured fallopian tube, and Mittelschmerz.

[0833] Infectious Disease

[0834] Albumin fusion proteins of the invention and/or polynucleotides encoding albumin fusion proteins of the invention can be used to treat or detect infectious agents. For example, by increasing the immune response, particularly increasing the proliferation and differentiation of B and/or T cells, infectious diseases may be treated. The immune response may be increased by either enhancing an existing immune response, or by initiating a new immune response. Alternatively, fusion proteins of the invention and/or polynucleotides encoding albumin fusion proteins of the invention may also directly inhibit the infectious agent, without necessarily eliciting an immune response.

[0835] Viruses are one example of an infectious agent that can cause disease or symptoms that can be treated or detected by albumin fusion proteins of the invention and/or polynucleotides encoding albumin fusion proteins of the invention. Examples of viruses, include, but are not limited to Examples of viruses, include, but are not limited to the following DNA and RNA viruses and viral families: Arbovirus, Adenoviridae, Arenaviridae, Arterivirus, Birnaviridae, Bunyaviridae, Caliciviridae, Circoviridae, Coronaviridae, Dengue, EBV, HIV, Flaviviridae, Hepadnaviridae (Hepatitis), Herpesviridae (such as, Cytomegalovirus, Herpes Simplex, Herpes Zoster), Mononegavirus (e.g., Paramyxoviridae, Morbillivirus, Rhabdoviridae), Orthomyxoviridae (e.g., Influenza A, Influenza B, and parainfluenza), Papiloma virus, Papovaviridae, Parvoviridae, Picornaviridae, Poxyiridae (such as Smallpox or Vaccinia), Reoviridae (e.g., Rotavirus), Retroviridae (HTLV-I, HTLV-II, Lentivirus), and Togaviridae (e.g., Rubivirus). Viruses falling within these families can cause a variety of diseases or symptoms, including, but not limited to: arthritis, bronchiollitis, respiratory syncytial virus, encephalitis, eye infections (e.g., conjunctivitis, keratitis), chronic fatigue syndrome, hepatitis (A, B, C, E, Chronic Active, Delta), Japanese B encephalitis, Junin, Chikungunya, Rift Valley fever, yellow fever, meningitis, opportunistic infections (e.g., AIDS), pneumonia, Burkitt's Lymphoma, chickenpox, hemorrhagic fever, Measles, Mumps, Parainfluenza, Rabies, the common cold, Polio, leukemia, Rubella, sexually transmitted diseases, skin diseases (e.g., Kaposi's, warts), and viremia. Albumin fusion proteins of the invention and/or polynucleotides encoding albumin fusion proteins of the invention, can be used to treat or detect any of these symptoms or diseases. In specific embodiments, fusion proteins of the invention and/or polynucleotides encoding albumin fusion proteins of the invention are used to treat: meningitis, Dengue, EBV, and/or hepatitis (e.g., hepatitis B). In an additional specific embodiment fusion proteins of the invention and/or polynucleotides encoding albumin fusion proteins of the invention are used to treat patients nonresponsive to one or more other commercially available hepatitis vaccines. In a further specific embodiment fusion proteins of the invention and/or polynucleotides encoding albumin fusion proteins of the invention are used to treat AIDS.

[0836] Similarly, bacterial and fungal agents that can cause disease or symptoms and that can be treated or detected by albumin fusion proteins of the invention and/or polynucleotides encoding albumin fusion proteins of the invention include, but not limited to, the following Gram-Negative and Gram-positive bacteria, bacterial families, and fungi: Actinomyces (e.g., Norcardia), Acinetobacter, Cryptococcus neoformans, Aspergillus, Bacillaceae (e.g., Bacillus anthrasis), Bacteroides (e.g., Bacteroides fragilis), Blastomycosis, Bordetella, Borrelia (e.g., Borrelia burgdorferi), Brucella, Candidia, Campylobacter, Chlamydia, Clostridium (e.g., Clostridium botulinum, Clostridium difficile, Clostridium perfringens, Clostridium tetani), Coccidioides, Corynebacterium (e.g., Corynebacterium diptheriae), Cryptococcus, Dermatocycoses, E. coli (e.g., Enterotoxigenic E. coli and Enterohemorrhagic E. coli), Enterobacter (e.g. Enterobacter aerogenes), Enterobacteriaceae (Klebsiella, Salmonella (e.g., Salmonella typhi, Salmonella enteritidis, Salmonella typhi), Serratia, Yersinia, Shigella), Erysipelothrix, Haemophilus (e.g., Haemophilus influenza type B), Helicobacter, Legionella (e.g., Legionella pneumophila), Leptospira, Listeria (e.g., Listeria monocytogenes), Mycoplasma, Mycobacterium (e.g., Mycobacterium leprae and Mycobacterium tuberculosis), Vibrio (e.g., Vibrio cholerae), Neisseriaceae (e.g., Neisseria gonorrhea, Neisseria meningitidis), Pasteurellacea, Proteus, Pseudomonas (e.g., Pseudomonas aeruginosa), Rickettsiaceae, Spirochetes (e.g., Treponema spp., Leptospira spp., Borrelia spp.), Shigella spp., Staphylococcus (e.g., Staphylococcus aureus), Meningiococcus, Pneumococcus and Streptococcus (e.g., Streptococcus pneumoniae and Groups A, B, and C Streptococci), and Ureaplasmas. These bacterial, parasitic, and fungal families can cause diseases or symptoms, including, but not limited to: antibiotic-resistant infections, bacteremia, endocarditis, septicemia, eye infections (e.g., conjunctivitis), uveitis, tuberculosis, gingivitis, bacterial diarrhea, opportunistic infections (e.g., AIDS related infections), paronychia, prosthesis-related infections, dental caries, Reiter's Disease, respiratory tract infections, such as Whooping Cough or Empyema, sepsis, Lyme Disease, Cat-Scratch Disease, dysentery, paratyphoid fever, food poisoning, Legionella disease, chronic and acute inflammation, erythema, yeast infections, typhoid, pneumonia, gonorrhea, meningitis (e.g., mengitis types A and B), chlamydia, syphillis, diphtheria, leprosy, brucellosis, peptic ulcers, anthrax, spontaneous abortions, birth defects, pneumonia, lung infections, ear infections, deafness, blindness, lethargy, malaise, vomiting, chronic diarrhea, Crohn's disease, colitis, vaginosis, sterility, pelvic inflammatory diseases, candidiasis, paratuberculosis, tuberculosis, lupus, botulism, gangrene, tetanus, impetigo, Rheumatic Fever, Scarlet Fever, sexually transmitted diseases, skin diseases (e.g., cellulitis, dermatocycoses), toxemia, urinary tract infections, wound infections, noscomial infections. Albumin fusion proteins of the invention and/or polynucleotides encoding albumin fusion proteins of the invention, can be used to treat or detect any of these symptoms or diseases. In specific embodiments, fusion proteins of the invention and/or polynucleotides encoding albumin fusion proteins of the invention are used to treat: tetanus, diptheria, botulism, and/or meningitis type B.

[0837] Moreover, parasitic agents causing disease or symptoms that can be treated, prevented, and/or diagnosed by fusion proteins of the invention and/or polynucleotides encoding albumin fusion proteins of the invention include, but not limited to, the following families or class: Amebiasis, Babesiosis, Coccidiosis, Cryptosporidiosis, Dientamoebiasis, Dourine, Ectoparasitic, Giardias, Helminthiasis, Leishmaniasis, Schistisoma, Theileriasis, Toxoplasmosis, Trypanosomiasis, and Trichomonas and Sporozoans (e.g., Plasmodium virax, Plasmodium falciparium, Plasmodium malariae and Plasmodium ovale). These parasites can cause a variety of diseases or symptoms, including, but not limited to: Scabies, Trombiculiasis, eye infections, intestinal disease (e.g., dysentery, giardiasis), liver disease, lung disease, opportunistic infections (e.g., AIDS related), malaria, pregnancy complications, and toxoplasmosis. Albumin fusion proteins of the invention and/or polynucleotides encoding albumin fusion proteins of the invention, can be used to treat, prevent, and/or diagnose any of these symptoms or diseases. In specific embodiments, fusion proteins of the invention and/or polynucleotides encoding albumin fusion proteins of the invention are used to treat, prevent, and/or diagnose malaria.

[0838] Albumin fusion proteins of the invention and/or polynucleotides encoding albumin fusion proteins of the invention could either be by administering an effective amount of an albumin fusion protein of the invention to the patient, or by removing cells from the patient, supplying the cells with a polynucleotide of the present invention, and returning the engineered cells to the patient (ex vivo therapy). Moreover, the albumin fusion proteins of the invention and/or polynucleotides encoding albumin fusion proteins of the invention can be used as an antigen in a vaccine to raise an immune response against infectious disease.

[0839] Regeneration

[0840] Albumin fusion proteins of the invention and/or polynucleotides encoding albumin fusion proteins of the invention can be used to differentiate, proliferate, and attract cells, leading to the regeneration of tissues. (See, Science 276:59-87 (1997)). The regeneration of tissues could be used to repair, replace, or protect tissue damaged by congenital defects, trauma (wounds, burns, incisions, or ulcers), age, disease (e.g. osteoporosis, osteocarthritis, periodontal disease, liver failure), surgery, including cosmetic plastic surgery, fibrosis, reperfusion injury, or systemic cytokine damage.

[0841] Tissues that could be regenerated using the present invention include organs (e.g., pancreas, liver, intestine, kidney, skin, endothelium), muscle (smooth, skeletal or cardiac), vasculature (including vascular and lymphatics), nervous, hematopoietic, and skeletal (bone, cartilage, tendon, and ligament) tissue. Preferably, regeneration occurs without or decreased scarring. Regeneration also may include angiogenesis.

[0842] Moreover, fusion proteins of the invention and/or polynucleotides encoding albumin fusion proteins of the invention, may increase regeneration of tissues difficult to heal. For example, increased tendon/ligament regeneration would quicken recovery time after damage. Albumin fusion proteins of the invention and/or polynucleotides encoding albumin fusion proteins of the invention could also be used prophylactically in an effort to avoid damage. Specific diseases that could be treated include of tendinitis, carpal tunnel syndrome, and other tendon or ligament defects. A further example of tissue regeneration of non-healing wounds includes pressure ulcers, ulcers associated with vascular insufficiency, surgical, and traumatic wounds.

[0843] Similarly, nerve and brain tissue could also be regenerated by using fusion proteins of the invention and/or polynucleotides encoding albumin fusion proteins of the invention, to proliferate and differentiate nerve cells. Diseases that could be treated using this method include central and peripheral nervous system diseases, neuropathies, or mechanical and traumatic disorders (e.g., spinal cord disorders, head trauma, cerebrovascular disease, and stoke). Specifically, diseases associated with peripheral nerve injuries, peripheral neuropathy (e.g., resulting from chemotherapy or other medical therapies), localized neuropathies, and central nervous system diseases (e.g., Alzheimer's disease, Parkinson's disease, Huntington's disease, amyotrophic lateral sclerosis, and Shy-Drager syndrome), could all be treated using the albumin fusion proteins of the invention and/or polynucleotides encoding albumin fusion proteins of the invention.

[0844] Gastrointestinal Disorders

[0845] Albumin fusion proteins of the invention and/or polynucleotides encoding albumin fusion proteins of the invention, may be used to treat, prevent, diagnose, and/or prognose gastrointestinal disorders, including inflammatory diseases and/or conditions, infections, cancers (e.g., intestinal neoplasms (carcinoid tumor of the small intestine, non-Hodgkin's lymphoma of the small intestine, small bowl lymphoma)), and ulcers, such as peptic ulcers.

[0846] Gastrointestinal disorders include dysphagia, odynophagia, inflammation of the esophagus, peptic esophagitis, gastric reflux, submucosal fibrosis and stricturing, Mallory-Weiss lesions, leiomyomas, lipomas, epidermal cancers, adenocarcinomas, gastric retention disorders, gastroenteritis, gastric atrophy, gastric/stomach cancers, polyps of the stomach, autoimmune disorders such as pernicious anemia, pyloric stenosis, gastritis (bacterial, viral, eosinophilic, stress-induced, chronic erosive, atrophic, plasma cell, and Ménétrier's), and peritoneal diseases (e.g., chyloperioneum, hemoperitoneum, mesenteric cyst, mesenteric lymphadenitis, mesenteric vascular occlusion, panniculitis, neoplasms, peritonitis, pneumoperitoneum, bubphrenic abscess).

[0847] Gastrointestinal disorders also include disorders associated with the small intestine, such as malabsorption syndromes, distension, irritable bowel syndrome, sugar intolerance, celiac disease, duodenal ulcers, duodenitis, tropical sprue, Whipple's disease, intestinal lymphangiectasia, Crohn's disease, appendicitis, obstructions of the ileum, Meckel's diverticulum, multiple diverticula, failure of complete rotation of the small and large intestine, lymphoma, and bacterial and parasitic diseases (such as Traveler's diarrhea, typhoid and paratyphoid, cholera, infection by Roundworms (Ascariasis lumbricoides), Hookworms (Ancylostoma duodenale), Threadworms (Enterobius vermicularis), Tapeworms (Taenia saginata, Echinococcus granulosus, Diphyllobothrium spp., and T. solium).

[0848] Liver diseases and/or disorders include intrahepatic cholestasis (alagille syndrome, biliary liver cirrhosis), fatty liver (alcoholic fatty liver, reye syndrome), hepatic vein thrombosis, hepatolentricular degeneration, hepatomegaly, hepatopulmonary syndrome, hepatorenal syndrome, portal hypertension (esophageal and gastric varices), liver abscess (amebic liver abscess), liver cirrhosis (alcoholic, biliary and experimental), alcoholic liver diseases (fatty liver, hepatitis, cirrhosis), parasitic (hepatic echinococcosis, fascioliasis, amebic liver abscess), jaundice (hemolytic, hepatocellular, and cholestatic), cholestasis, portal hypertension, liver enlargement, ascites, hepatitis (alcoholic hepatitis, animal hepatitis, chronic hepatitis (autoimmune, hepatitis B, hepatitis C, hepatitis D, drug induced), toxic hepatitis, viral human hepatitis (hepatitis A, hepatitis B, hepatitis C, hepatitis D, hepatitis E), Wilson's disease, granulomatous hepatitis, secondary biliary cirrhosis, hepatic encephalopathy, portal hypertension, varices, hepatic encephalopathy, primary biliary cirrhosis, primary sclerosing cholangitis, hepatocellular adenoma, hemangiomas, bile stones, liver failure (hepatic encephalopathy, acute liver failure), and liver neoplasms (angiomyolipoma, calcified liver metastases, cystic liver metastases, epithelial tumors, fibrolamellar hepatocarcinoma, focal nodular hyperplasia, hepatic adenoma, hepatobiliary cystadenoma, hepatoblastoma, hepatocellular carcinoma, hepatoma, liver cancer, liver hemangioendothelioma, mesenchymal hamartoma, mesenchymal tumors of liver, nodular regenerative hyperplasia, benign liver tumors (Hepatic cysts [Simple cysts, Polycystic liver disease, Hepatobiliary cystadenoma, Choledochal cyst], Mesenchymal tumors [Mesenchymal hamartoma, Infantile hemangioendothelioma, Hemangioma, Peliosis hepatis, Lipomas, Inflammatory pseudotumor, Miscellaneous], Epithelial tumors [Bile duct epithelium (Bile duct hamartoma, Bile duct adenoma), Hepatocyte (Adenoma, Focal nodular hyperplasia, Nodular regenerative hyperplasia)], malignant liver tumors [hepatocellular, hepatoblastoma, hepatocellular carcinoma, cholangiocellular, cholangiocarcinoma, cystadenocarcinoma, tumors of blood vessels, angiosarcoma, Karposi's sarcoma, hemangioendothelioma, other tumors, embryonal sarcoma, fibrosarcoma, leiomyosarcoma, rhabdomyosarcoma, carcinosarcoma, teratoma, carcinoid, squamous carcinoma, primary lymphoma]), peliosis hepatis, erythrohepatic porphyria, hepatic porphyria (acute intermittent porphyria, porphyria cutanea tarda), Zellweger syndrome).

[0849] Pancreatic diseases and/or disorders include acute pancreatitis, chronic pancreatitis (acute necrotizing pancreatitis, alcoholic pancreatitis), neoplasms (adenocarcinoma of the pancreas, cystadenocarcinoma, insulinoma, gastrinoma, and glucagonoma, cystic neoplasms, islet-cell tumors, pancreoblastoma), and other pancreatic diseases (e.g., cystic fibrosis, cyst (pancreatic pseudocyst, pancreatic fistula, insufficiency)).

[0850] Gallbladder diseases include gallstones (cholelithiasis and choledocholithiasis), postcholecystectomy syndrome, diverticulosis of the gallbladder, acute cholecystitis, chronic cholecystitis, bile duct tumors, and mucocele.

[0851] Diseases and/or disorders of the large intestine include antibiotic-associated colitis, diverticulitis, ulcerative colitis, acquired megacolon, abscesses, fungal and bacterial infections, anorectal disorders (e.g., fissures, hemorrhoids), colonic diseases (colitis, colonic neoplasms [colon cancer, adenomatous colon polyps (e.g., villous adenoma), colon carcinoma, colorectal cancer], colonic diverticulitis, colonic diverticulosis, megacolon [Hirschsprung disease, toxic megacolon]; sigmoid diseases [proctocolitis, sigmoin neoplasms]), constipation, Crohn's disease, diarrhea (infantile diarrhea, dysentery), duodenal diseases (duodenal neoplasms, duodenal obstruction, duodenal ulcer, duodenitis), enteritis (enterocolitis), HIV enteropathy, ileal diseases (ileal neoplasms, ileitis), immunoproliferative small intestinal disease, inflammatory bowel disease (ulcerative colitis, Crohn's disease), intestinal atresia, parasitic diseases (anisakiasis, balantidiasis, blastocystis infections, cryptosporidiosis, dientamoebiasis, amebic dysentery, giardiasis), intestinal fistula (rectal fistula), intestinal neoplasms (cecal neoplasms, colonic neoplasms, duodenal neoplasms, ileal neoplasms, intestinal polyps, jejunal neoplasms, rectal neoplasms), intestinal obstruction (afferent loop syndrome, duodenal obstruction, impacted feces, intestinal pseudo-obstruction [cecal volvulus], intussusception), intestinal perforation, intestinal polyps (colonic polyps, gardner syndrome, peutz-jeghers syndrome), jejunal diseases (jejunal neoplasms), malabsorption syndromes (blind loop syndrome, celiac disease, lactose intolerance, short bowl syndrome, tropical sprue, whipple's disease), mesenteric vascular occlusion, pneumatosis cystoides intestinalis, protein-losing enteropathies (intestinal lymphagiectasis), rectal diseases (anus diseases, fecal incontinence, hemorrhoids, proctitis, rectal fistula, rectal prolapse, rectocele), peptic ulcer (duodenal ulcer, peptic esophagitis, hemorrhage, perforation, stomach ulcer, Zollinger-Ellison syndrome), postgastrectomy syndromes (dumping syndrome), stomach diseases (e.g., achlorhydria, duodenogastric reflux (bile reflux), gastric antral vascular ectasia, gastric fistula, gastric outlet obstruction, gastritis (atrophic or hypertrophic), gastroparesis, stomach dilatation, stomach diverticulum, stomach neoplasms (gastric cancer, gastric polyps, gastric adenocarcinoma, hyperplastic gastric polyp), stomach rupture, stomach ulcer, stomach volvulus), tuberculosis, visceroptosis, vomiting (e.g., hematemesis, hyperemesis gravidarum, postoperative nausea and vomiting) and hemorrhagic colitis.

[0852] Further diseases and/or disorders of the gastrointestinal system include biliary tract diseases, such as, gastroschisis, fistula (e.g., biliary fistula, esophageal fistula, gastric fistula, intestinal fistula, pancreatic fistula), neoplasms (e.g., biliary tract neoplasms, esophageal neoplasms, such as adenocarcinoma of the esophagus, esophageal squamous cell carcinoma, gastrointestinal neoplasms, pancreatic neoplasms, such as adenocarcinoma of the pancreas, mucinous cystic neoplasm of the pancreas, pancreatic cystic neoplasms, pancreatoblastoma, and peritoneal neoplasms), esophageal disease (e.g., bullous diseases, candidiasis, glycogenic acanthosis, ulceration, barrett esophagus varices, atresia, cyst, diverticulum (e.g., Zenker's diverticulum), fistula (e.g., tracheoesophageal fistula), motility disorders (e.g., CREST syndrome, deglutition disorders, achalasia, spasm, gastroesophageal reflux), neoplasms, perforation (e.g., Boerhaave syndrome, Mallory-Weiss syndrome), stenosis, esophagitis, diaphragmatic hernia (e.g., hiatal hernia); gastrointestinal diseases, such as, gastroenteritis (e.g., cholera morbus, norwalk virus infection), hemorrhage (e.g., hematemesis, melena, peptic ulcer hemorrhage), stomach neoplasms (gastric cancer, gastric polyps, gastric adenocarcinoma, stomach cancer)), hernia (e.g., congenital diaphragmatic hernia, femoral hernia, inguinal hernia, obturator hernia, umbilical hernia, ventral hernia), and intestinal diseases (e.g., cecal diseases (appendicitis, cecal neoplasms)).

[0853] Chemotaxis

[0854] Albumin fusion proteins of the invention and/or polynucleotides encoding albumin fusion proteins of the invention may have chemotaxis activity. A chemotaxic molecule attracts or mobilizes cells (e.g., monocytes, fibroblasts, neutrophils, T-cells, mast cells, eosinophils, epithelial and/or endothelial cells) to a particular site in the body, such as inflammation, infection, or site of hyperproliferation. The mobilized cells can then fight off and/or heal the particular trauma or abnormality.

[0855] Albumin fusion proteins of the invention and/or polynucleotides encoding albumin fusion proteins of the invention may increase chemotaxic activity of particular cells. These chemotactic molecules can then be used to treat inflammation, infection, hyperproliferative disorders, or any immune system disorder by increasing the number of cells targeted to a particular location in the body. For example, chemotaxic molecules can be used to treat wounds and other trauma to tissues by attracting immune cells to the injured location. Chemotactic molecules of the present invention can also attract fibroblasts, which can be used to treat wounds.

[0856] It is also contemplated that fusion proteins of the invention and/or polynucleotides encoding albumin fusion proteins of the invention may inhibit chemotactic activity. These molecules could also be used to treat disorders. Thus, fusion proteins of the invention and/or polynucleotides encoding albumin fusion proteins of the invention could be used as an inhibitor of chemotaxis.

[0857] Binding Activity

[0858] Albumin fusion proteins of the invention may be used to screen for molecules that bind to the Therapeutic protein portion of the fusion protein or for molecules to which the Therapeutic protein portion of the fusion protein binds. The binding of the fusion protein and the molecule may activate (agonist), increase, inhibit (antagonist), or decrease activity of the fusion protein or the molecule bound. Examples of such molecules include antibodies, oligonucleotides, proteins (e.g., receptors), or small molecules.

[0859] Preferably, the molecule is closely related to the natural ligand of the Therapeutic protein portion of the fusion protein of the invention, e.g., a fragment of the ligand, or a natural substrate, a ligand, a structural or functional mimetic. (See, Coligan et al., Current Protocols in Immunology 1(2):Chapter 5 (1991)). Similarly, the molecule can be closely related to the natural receptor to which the Therapeutic protein portion of an albumin fusion protein of the invention binds, or at least, a fragment of the receptor capable of being bound by the Therapeutic protein portion of an albumin fusion protein of the invention (e.g., active site). In either case, the molecule can be rationally designed using known techniques.

[0860] Preferably, the screening for these molecules involves producing appropriate cells which express the albumin fusion proteins of the invention. Preferred cells include cells from mammals, yeast, Drosophila, or E. coli.

[0861] The assay may simply test binding of a candidate compound to an albumin fusion protein of the invention, wherein binding is detected by a label, or in an assay involving competition with a labeled competitor. Further, the assay may test whether the candidate compound results in a signal generated by binding to the fusion protein.

[0862] Alternatively, the assay can be carried out using cell-free preparations, fusion protein/molecule affixed to a solid support, chemical libraries, or natural product mixtures. The assay may also simply comprise the steps of mixing a candidate compound with a solution containing an albumin fusion protein, measuring fusion protein/molecule activity or binding, and comparing the fusion protein/molecule activity or binding to a standard.

[0863] Preferably, an ELISA assay can measure fusion protein level or activity in a sample (e.g., biological sample) using a monoclonal or polyclonal antibody. The antibody can measure fusion protein level or activity by either binding, directly or indirectly, to the albumin fusion protein or by competing with the albumin fusion protein for a substrate.

[0864] Additionally, the receptor to which a Therapeutic protein portion of an albumin fusion protein of the invention binds can be identified by numerous methods known to those of skill in the art, for example, ligand panning and FACS sorting (Coligan, et al., Current Protocols in Immun., 1(2), Chapter 5, (1991)). For example, in cases wherein the Therapeutic protein portion of the fusion protein corresponds to FGF, expression cloning may be employed wherein polyadenylated RNA is prepared from a cell responsive to the albumin fusion protein, for example, NIH3T3 cells which are known to contain multiple receptors for the FGF family proteins, and SC-3 cells, and a cDNA library created from this RNA is divided into pools and used to transfect COS cells or other cells that are not responsive to the albumin fusion protein. Transfected cells which are grown on glass slides are exposed to the albumin fusion protein of the present invention, after they have been labeled. The albumin fusion proteins can be labeled by a variety of means including iodination or inclusion of a recognition site for a site-specific protein kinase.

[0865] Following fixation and incubation, the slides are subjected to auto-radiographic analysis. Positive pools are identified and sub-pools are prepared and re-transfected using an iterative sub-pooling and re-screening process, eventually yielding a single clones that encodes the putative receptor.

[0866] As an alternative approach for receptor identification, a labeled albumin fusion protein can be photoaffinity linked with cell membrane or extract preparations that express the receptor molecule for the Therapeutoc protein component of an albumin fusion protein of the invention, the linked material may be resolved by PAGE analysis and exposed to X-ray film. The labeled complex containing the receptors of the fusion protein can be excised, resolved into peptide fragments, and subjected to protein microsequencing. The amino acid sequence obtained from microsequencing would be used to design a set of degenerate oligonucleotide probes to screen a cDNA library to identify the genes encoding the putative receptors.

[0867] Moreover, the techniques of gene-shuffling, motif-shuffling, exon-shuffling, and/or codon-shuffling (collectively referred to as “DNA shuffling”) may be employed to modulate the activities of the fusion protein, and/or Therapeutic protein portion or albumin component of an albumin fusion protein of the present invention, thereby effectively generating agonists and antagonists of an albumin fusion protein of the present invention. See generally, U.S. Pat. Nos. 5,605,793, 5,811,238, 5,830,721, 5,834,252, and 5,837,458, and Patten, P. A., et al., Curr. Opinion Biotechnol. 8:724-33 (1997); Harayama, S. Trends Biotechnol. 16(2):76-82 (1998); Hansson, L. O., et al., J. Mol. Biol. 287:265-76 (1999); and Lorenzo, M. M. and Blasco, R. Biotechniques 24(2):308-13 (1998); each of these patents and publications are hereby incorporated by reference). In one embodiment, alteration of polynucleotides encoding albumin fusion proteins of the invention and thus, the albumin fusion proteins encoded thereby, may be achieved by DNA shuffling. DNA shuffling involves the assembly of two or more DNA segments into a desired molecule by homologous, or site-specific, recombination. In another embodiment, polynucleotides encoding albumin fusion proteins of the invention and thus, the albumin fusion proteins encoded thereby, may be altered by being subjected to random mutagenesis by error-prone PCR, random nucleotide insertion or other methods prior to recombination. In another embodiment, one or more components, motifs, sections, parts, domains, fragments, etc., of an albumin fusion protein of the present invention may be recombined with one or more components, motifs, sections, parts, domains, fragments, etc. of one or more heterologous molecules. In preferred embodiments, the heterologous molecules are family members. In further preferred embodiments, the heterologous molecule is a growth factor such as, for example, platelet-derived growth factor (PDGF), insulin-like growth factor (IGF-I), transforming growth factor (TGF)-alpha, epidermal growth factor (EGF), fibroblast growth factor (FGF), TGF-beta, bone morphogenetic protein (BMP)-2, BMP-4, BMP-5, BMP-6, BMP-7, activins A and B, decapentaplegic (dpp), 60A, OP-2, dorsalin, growth differentiation factors (GDFs), nodal, MIS, inhibin-alpha, TGF-beta1, TGF-beta2, TGF-beta3, TGF-beta5, and glial-derived neurotrophic factor (GDNF).

[0868] Other preferred fragments are biologically active fragments of the Therapeutic protein portion and/or albumin component of the albumin fusion proteins of the present invention. Biologically active fragments are those exhibiting activity similar, but not necessarily identical, to an activity of a Therapeutic protein portion and/or albumin component of the albumin fusion proteins of the present invention. The biological activity of the fragments may include an improved desired activity, or a decreased undesirable activity.

[0869] Additionally, this invention provides a method of screening compounds to identify those which modulate the action of an albumin fusion protein of the present invention. An example of such an assay comprises combining a mammalian fibroblast cell, an albumin fusion protein of the present invention, and the compound to be screened and ³[H] thymidine under cell culture conditions where the fibroblast cell would normally proliferate. A control assay may be performed in the absence of the compound to be screened and compared to the amount of fibroblast proliferation in the presence of the compound to determine if the compound stimulates proliferation by determining the uptake of ³[H] thymidine in each case. The amount of fibroblast cell proliferation is measured by liquid scintillation chromatography which measures the incorporation of ³[H] thymidine. Both agonist and antagonist compounds may be identified by this procedure.

[0870] In another method, a mammalian cell or membrane preparation expressing a receptor for the Therapeutic protein component of a fusion protein of the invention is incubated with a labeled fusion protein of the present invention in the presence of the compound. The ability of the compound to enhance or block this interaction could then be measured. Alternatively, the response of a known second messenger system following interaction of a compound to be screened and the receptor is measured and the ability of the compound to bind to the receptor and elicit a second messenger response is measured to determine if the compound is a potential fusion protein. Such second messenger systems include but are not limited to, cAMP guanylate cyclase, ion channels or phosphoinositide hydrolysis.

[0871] All of these above assays can be used as diagnostic or prognostic markers. The molecules discovered using these assays can be used to treat disease or to bring about a particular result in a patient (e.g., blood vessel growth) by activating or inhibiting the fusion protein/molecule. Moreover, the assays can discover agents which may inhibit or enhance the production of the albumin fusion proteins of the invention from suitably manipulated cells or tissues.

[0872] Therefore, the invention includes a method of identifying compounds which bind to an albumin fusion protein of the invention comprising the steps of: (a) incubating a candidate binding compound with an albumin fusion protein of the present invention; and (b) determining if binding has occurred. Moreover, the invention includes a method of identifying agonists/antagonists comprising the steps of: (a) incubating a candidate compound with an albumin fusion protein of the present invention, (b) assaying a biological activity, and (b) determining if a biological activity of the fusion protein has been altered.

[0873] Targeted Delivery

[0874] In another embodiment, the invention provides a method of delivering compositions to targeted cells expressing a receptor for a component of an albumin fusion protein of the invention.

[0875] As discussed herein, fusion proteins of the invention may be associated with heterologous polypeptides, heterologous nucleic acids, toxins, or prodrugs via hydrophobic, hydrophilic, ionic and/or covalent interactions. In one embodiment, the invention provides a method for the specific delivery of compositions of the invention to cells by administering fusion proteins of the invention (including antibodies) that are associated with heterologous polypeptides or nucleic acids. In one example, the invention provides a method for delivering a Therapeutic protein into the targeted cell. In another example, the invention provides a method for delivering a single stranded nucleic acid (e.g., antisense or ribozymes) or double stranded nucleic acid (e.g., DNA that can integrate into the cell's genome or replicate episomally and that can be transcribed) into the targeted cell.

[0876] In another embodiment, the invention provides a method for the specific destruction of cells (e.g., the destruction of tumor cells) by administering an albumin fusion protein of the invention (e.g., polypeptides of the invention or antibodies of the invention) in association with toxins or cytotoxic prodrugs.

[0877] By “toxin” is meant compounds that bind and activate endogenous cytotoxic effector systems, radioisotopes, holotoxins, modified toxins, catalytic subunits of toxins, or any molecules or enzymes not normally present in or on the surface of a cell that under defined conditions cause the cell's death. Toxins that may be used according to the methods of the invention include, but are not limited to, radioisotopes known in the art, compounds such as, for example, antibodies (or complement fixing containing portions thereof) that bind an inherent or induced endogenous cytotoxic effector system, thymidine kinase, endonuclease, RNAse, alpha toxin, ricin, abrin, Pseudomonas exotoxin A, diphtheria toxin, saporin, momordin, gelonin, pokeweed antiviral protein, alpha-sarcin and cholera toxin. By “cytotoxic prodrug” is meant a non-toxic compound that is converted by an enzyme, normally present in the cell, into a cytotoxic compound. Cytotoxic prodrugs that may be used according to the methods of the invention include, but are not limited to, glutamyl derivatives of benzoic acid mustard alkylating agent, phosphate derivatives of etoposide or mitomycin C, cytosine arabinoside, daunorubisin, and phenoxyacetamide derivatives of doxorubicin.

[0878] Drug Screening

[0879] Further contemplated is the use of the albumin fusion proteins of the present invention, or the polynucleotides encoding these fusion proteins, to screen for molecules which modify the activities of the albumin fusion protein of the present invention or proteins corresponding to the Therapeutic protein portion of the albumin fusion protein. Such a method would include contacting the fusion protein with a selected compound(s) suspected of having antagonist or agonist activity, and assaying the activity of the fusion protein following binding.

[0880] This invention is particularly useful for screening therapeutic compounds by using the albumin fusion proteins of the present invention, or binding fragments thereof, in any of a variety of drug screening techniques. The albumin fusion protein employed in such a test may be affixed to a solid support, expressed on a cell surface, free in solution, or located intracellularly. One method of drug screening utilizes eukaryotic or prokaryotic host cells which are stably transformed with recombinant nucleic acids expressing the albumin fusion protein. Drugs are screened against such transformed cells or supernatants obtained from culturing such cells, in competitive binding assays. One may measure, for example, the formulation of complexes between the agent being tested and an albumin fusion protein of the present invention.

[0881] Thus, the present invention provides methods of screening for drugs or any other agents which affect activities mediated by the albumin fusion proteins of the present invention. These methods comprise contacting such an agent with an albumin fusion protein of the present invention or a fragment thereof and assaying for the presence of a complex between the agent and the albumin fusion protein or a fragment thereof, by methods well known in the art. In such a competitive binding assay, the agents to screen are typically labeled. Following incubation, free agent is separated from that present in bound form, and the amount of free or uncomplexed label is a measure of the ability of a particular agent to bind to the albumin fusion protein of the present invention.

[0882] Another technique for drug screening provides high throughput screening for compounds having suitable binding affinity to an albumin fusion protein of the present invention, and is described in great detail in European Patent Application 84/03564, published on Sep. 13, 1984, which is incorporated herein by reference herein. Briefly stated, large numbers of different small peptide test compounds are synthesized on a solid substrate, such as plastic pins or some other surface. The peptide test compounds are reacted with an albumin fusion protein of the present invention and washed. Bound peptides are then detected by methods well known in the art. Purified albumin fusion protein may be coated directly onto plates for use in the aforementioned drug screening techniques. In addition, non-neutralizing antibodies may be used to capture the peptide and immobilize it on the solid support.

[0883] This invention also contemplates the use of competitive drug screening assays in which neutralizing antibodies capable of binding an albumin fusion protein of the present invention specifically compete with a test compound for binding to the albumin fusion protein or fragments thereof. In this manner, the antibodies are used to detect the presence of any peptide which shares one or more antigenic epitopes with an albumin fusion protein of the invention.

[0884] Binding Peptides and Other Molecules

[0885] The invention also encompasses screening methods for identifying polypeptides and nonpolypeptides that bind albumin fusion proteins of the invention, and the binding molecules identified thereby. These binding molecules are useful, for example, as agonists and antagonists of the albumin fusion proteins of the invention. Such agonists and antagonists can be used, in accordance with the invention, in the therapeutic embodiments described in detail, below.

[0886] This method comprises the steps of: contacting an albumin fusion protein of the invention with a plurality of molecules; and identifying a molecule that binds the albumin fusion protein.

[0887] The step of contacting the albumin fusion protein of the invention with the plurality of molecules may be effected in a number of ways. For example, one may contemplate immobilizing the albumin fusion protein on a solid support and bringing a solution of the plurality of molecules in contact with the immobilized polypeptides. Such a procedure would be akin to an affinity chromatographic process, with the affinity matrix being comprised of the immobilized albumin fusion protein of the invention. The molecules having a selective affinity for the albumin fusion protein can then be purified by affinity selection. The nature of the solid support, process for attachment of the albumin fusion protein to the solid support, solvent, and conditions of the affinity isolation or selection are largely conventional and well known to those of ordinary skill in the art.

[0888] Alternatively, one may also separate a plurality of polypeptides into substantially separate fractions comprising a subset of or individual polypeptides. For instance, one can separate the plurality of polypeptides by gel electrophoresis, column chromatography, or like method known to those of ordinary skill for the separation of polypeptides. The individual polypeptides can also be produced by a transformed host cell in such a way as to be expressed on or about its outer surface (e.g., a recombinant phage). Individual isolates can then be “probed” by an albumin fusion protein of the invention, optionally in the presence of an inducer should one be required for expression, to determine if any selective affinity interaction takes place between the albumin fusion protein and the individual clone. Prior to contacting the albumin fusion protein with each fraction comprising individual polypeptides, the polypeptides could first be transferred to a solid support for additional convenience. Such a solid support may simply be a piece of filter membrane, such as one made of nitrocellulose or nylon. In this manner, positive clones could be identified from a collection of transformed host cells of an expression library, which harbor a DNA construct encoding a polypeptide having a selective affinity for an albumin fusion protein of the invention. Furthermore, the amino acid sequence of the polypeptide having a selective affinity for an albumin fusion protein of the invention can be determined directly by conventional means or the coding sequence of the DNA encoding the polypeptide can frequently be determined more conveniently. The primary sequence can then be deduced from the corresponding DNA sequence. If the amino acid sequence is to be determined from the polypeptide itself, one may use microsequencing techniques. The sequencing technique may include mass spectroscopy.

[0889] In certain situations, it may be desirable to wash away any unbound polypeptides from a mixture of an albumin fusion protein of the invention and the plurality of polypeptides prior to attempting to determine or to detect the presence of a selective affinity interaction. Such a wash step may be particularly desirable when the albumin fusion protein of the invention or the plurality of polypeptides are bound to a solid support.

[0890] The plurality of molecules provided according to this method may be provided by way of diversity libraries, such as random or combinatorial peptide or nonpeptide libraries which can be screened for molecules that specifically bind an albumin fusion protein of the invention. Many libraries are known in the art that can be used, e.g., chemically synthesized libraries, recombinant (e.g., phage display libraries), and in vitro translation-based libraries. Examples of chemically synthesized libraries are described in Fodor et al., Science 251:767-773 (1991); Houghten et al., Nature 354:84-86 (1991); Lam et al., Nature 354:82-84 (1991); Medynski, Bio/Technology 12:709-710 (1994); Gallop et al., J. Medicinal Chemistry 37(9):1233-1251 (1994); Ohlmeyer et al., Proc. Natl. Acad. Sci. USA 90:10922-10926 (1993); Erb et al., Proc. Natl. Acad. Sci. USA 91:11422-11426 (1994); Houghten et al., Biotechniques 13:412 (1992); Jayawickreme et al., Proc. Natl. Acad. Sci. USA 91:1614-1618 (1994); Salmon et al., Proc. Natl. Acad. Sci. USA 90:11708-11712 (1993); PCT Publication No. WO 93/20242; and Brenner and Lerner, Proc. Natl. Acad. Sci. USA 89:5381-5383 (1992).

[0891] Examples of phage display libraries are described in Scott et al., Science 249:386-390 (1990); Devlin et al., Science, 249:404-406 (1990); Christian et al., 1992, J. Mol. Biol. 227:711-718 1992); Lenstra, J. Immunol. Meth. 152:149-157 (1992); Kay et al., Gene 128:59-65 (1993); and PCT Publication No. WO 94/18318 dated Aug. 18, 1994.

[0892] In vitro translation-based libraries include but are not limited to those described in PCT Publication No. WO 91/05058 dated Apr. 18, 1991; and Mattheakis et al., Proc. Natl. Acad. Sci. USA 91:9022-9026 (1994).

[0893] By way of examples of nonpeptide libraries, a benzodiazepine library (see e.g., Bunin et al., Proc. Natl. Acad. Sci. USA 91:4708-4712 (1994)) can be adapted for use. Peptoid libraries (Simon et al., Proc. Natl. Acad. Sci. USA 89:9367-9371 (1992)) can also be used. Another example of a library that can be used, in which the amide functionalities in peptides have been permethylated to generate a chemically transformed combinatorial library, is described by Ostresh et al. (Proc. Natl. Acad. Sci. USA 91:11138-11142 (1994)).

[0894] The variety of non-peptide libraries that are useful in the present invention is great. For example, Ecker and Crooke (Bio/Technology 13:351-360 (1995) list benzodiazepines, hydantoins, piperazinediones, biphenyls, sugar analogs, beta-mercaptoketones, arylacetic acids, acylpiperidines, benzopyrans, cubanes, xanthines, aminimides, and oxazolones as among the chemical species that form the basis of various libraries.

[0895] Non-peptide libraries can be classified broadly into two types: decorated monomers and oligomers. Decorated monomer libraries employ a relatively simple scaffold structure upon which a variety functional groups is added. Often the scaffold will be a molecule with a known useful pharmacological activity. For example, the scaffold might be the benzodiazepine structure.

[0896] Non-peptide oligomer libraries utilize a large number of monomers that are assembled together in ways that create new shapes that depend on the order of the monomers. Among the monomer units that have been used are carbamates, pyrrolinones, and morpholinos. Peptoids, peptide-like oligomers in which the side chain is attached to the alpha amino group rather than the alpha carbon, form the basis of another version of non-peptide oligomer libraries. The first non-peptide oligomer libraries utilized a single type of monomer and thus contained a repeating backbone. Recent libraries have utilized more than one monomer, giving the libraries added flexibility.

[0897] Screening the libraries can be accomplished by any of a variety of commonly known methods. See, e.g., the following references, which disclose screening of peptide libraries: Parmley et al., Adv. Exp. Med. Biol. 251:215-218 (1989); Scott et al., Science 249:386-390 (1990); Fowlkes et al., BioTechniques 13:422-427 (1992); Oldenburg et al., Proc. Natl. Acad. Sci. USA 89:5393-5397 (1992); Yu et al., Cell 76:933-945 (1994); Staudt et al., Science 241:577-580 (1988); Bock et al., Nature 355:564-566 (1992); Tuerk et al., Proc. Natl. Acad. Sci. USA 89:6988-6992 (1992); Ellington et al., Nature 355:850-852 (1992); U.S. Pat. No. 5,096,815, U.S. Pat. No. 5,223,409, and U.S. Pat. No. 5,198,346, all to Ladner et al.; Rebar et al., Science 263:671-673 (1993); and PCT Publication No. WO 94/18318.

[0898] In a specific embodiment, screening to identify a molecule that binds an albumin fusion protein of the invention can be carried out by contacting the library members with an albumin fusion protein of the invention immobilized on a solid phase and harvesting those library members that bind to the albumin fusion protein. Examples of such screening methods, termed “panning” techniques are described by way of example in Parmley et al., Gene 73:305-318 (1988); Fowlkes et al., BioTechniques 13:422-427 (1992); PCT Publication No. WO 94/18318; and in references cited herein.

[0899] In another embodiment, the two-hybrid system for selecting interacting proteins in yeast (Fields et al., Nature 340:245-246 (1989); Chien et al., Proc. Natl. Acad. Sci. USA 88:9578-9582 (1991) can be used to identify molecules that specifically bind to polypeptides of the invention.

[0900] Where the binding molecule is a polypeptide, the polypeptide can be conveniently selected from any peptide library, including random peptide libraries, combinatorial peptide libraries, or biased peptide libraries. The term “biased” is used herein to mean that the method of generating the library is manipulated so as to restrict one or more parameters that govern the diversity of the resulting collection of molecules, in this case peptides.

[0901] Thus, a truly random peptide library would generate a collection of peptides in which the probability of finding a particular amino acid at a given position of the peptide is the same for all 20 amino acids. A bias can be introduced into the library, however, by specifying, for example, that a lysine occur every fifth amino acid or that positions 4, 8, and 9 of a decapeptide library be fixed to include only arginine. Clearly, many types of biases can be contemplated, and the present invention is not restricted to any particular bias. Furthermore, the present invention contemplates specific types of peptide libraries, such as phage displayed peptide libraries and those that utilize a DNA construct comprising a lambda phage vector with a DNA insert.

[0902] As mentioned above, in the case of a binding molecule that is a polypeptide, the polypeptide may have about 6 to less than about 60 amino acid residues, preferably about 6 to about 10 amino acid residues, and most preferably, about 6 to about 22 amino acids. In another embodiment, a binding polypeptide has in the range of 15-100 amino acids, or 20-50 amino acids.

[0903] The selected binding polypeptide can be obtained by chemical synthesis or recombinant expression.

[0904] Other Activities

[0905] An albumin fusion protein of the invention and/or polynucleotide encoding an albumin fusion protein of the invention, may be employed in treatment for stimulating re-vascularization of ischemic tissues due to various disease conditions such as thrombosis, arteriosclerosis, and other cardiovascular conditions. The albumin fusion proteins of the invention and/or polynucleotides encoding albumin fusion proteins of the invention may also be employed to stimulate angiogenesis and limb regeneration, as discussed above.

[0906] An albumin fusion protein of the invention and/or polynucleotide encoding an albumin fusion protein of the invention may also be employed for treating wounds due to injuries, burns, post-operative tissue repair, and ulcers since they are mitogenic to various cells of different origins, such as fibroblast cells and skeletal muscle cells, and therefore, facilitate the repair or replacement of damaged or diseased tissue.

[0907] An albumin fusion protein of the invention and/or polynucleotide encoding an albumin fusion protein of the invention may also be employed stimulate neuronal growth and to treat and prevent neuronal damage which occurs in certain neuronal disorders or neuro-degenerative conditions such as Alzheimer's disease, Parkinson's disease, and AIDS-related complex. An albumin fusion protein of the invention and/or polynucleotide encoding an albumin fusion protein of the invention may have the ability to stimulate chondrocyte growth, therefore, they may be employed to enhance bone and periodontal regeneration and aid in tissue transplants or bone grafts.

[0908] An albumin fusion protein of the invention and/or polynucleotide encoding an albumin fusion protein of the invention may be also be employed to prevent skin aging due to sunburn by stimulating keratinocyte growth.

[0909] An albumin fusion protein of the invention and/or polynucleotide encoding an albumin fusion protein of the invention may also be employed for preventing hair loss, since FGF family members activate hair-forming cells and promotes melanocyte growth. Along the same lines, an albumin fusion protein of the invention and/or polynucleotide encoding an albumin fusion protein of the invention may be employed to stimulate growth and differentiation of hematopoietic cells and bone marrow cells when used in combination with other cytokines.

[0910] An albumin fusion protein of the invention and/or polynucleotide encoding an albumin fusion protein of the invention may also be employed to maintain organs before transplantation or for supporting cell culture of primary tissues. An albumin fusion protein of the invention and/or polynucleotide encoding an albumin fusion protein of the invention may also be employed for inducing tissue of mesodermal origin to differentiate in early embryos.

[0911] An albumin fusion protein of the invention and/or polynucleotide encoding an albumin fusion protein of the invention may also increase or decrease the differentiation or proliferation of embryonic stem cells, besides, as discussed above, hematopoietic lineage.

[0912] An albumin fusion protein of the invention and/or polynucleotide encoding an albumin fusion protein of the invention may also be used to modulate mammalian characteristics, such as body height, weight, hair color, eye color, skin, percentage of adipose tissue, pigmentation, size, and shape (e.g., cosmetic surgery). Similarly, an albumin fusion protein of the invention and/or polynucleotide encoding an albumin fusion protein of the invention may be used to modulate mammalian metabolism affecting catabolism, anabolism, processing, utilization, and storage of energy.

[0913] An albumin fusion protein of the invention and/or polynucleotide encoding an albumin fusion protein of the invention may be used to change a mammal's mental state or physical state by influencing biorhythms, caricadic rhythms, depression (including depressive disorders), tendency for violence, tolerance for pain, reproductive capabilities (preferably by Activin or Inhibin-like activity), hormonal or endocrine levels, appetite, libido, memory, stress, or other cognitive qualities.

[0914] An albumin fusion protein of the invention and/or polynucleotide encoding an albumin fusion protein of the invention may also be used as a food additive or preservative, such as to increase or decrease storage capabilities, fat content, lipid, protein, carbohydrate, vitamins, minerals, cofactors or other nutritional components.

[0915] The above-recited applications have uses in a wide variety of hosts. Such hosts include, but are not limited to, human, murine, rabbit, goat, guinea pig, camel, horse, mouse, rat, hamster, pig, micro-pig, chicken, goat, cow, sheep, dog, cat, non-human primate, and human. In specific embodiments, the host is a mouse, rabbit, goat, guinea pig, chicken, rat, hamster, pig, sheep, dog or cat. In preferred embodiments, the host is a mammal. In most preferred embodiments, the host is a human.

[0916] Having generally described the invention, the same will be more readily understood by reference to the following examples, which are provided by way of illustration and are not intended as limiting.

[0917] Without further description, it is believed that one of ordinary skill in the art can, using the preceding description and the following illustrative examples, make and utilize the alterations detected in the present invention and practice the claimed methods. The following working examples therefore, specifically point out preferred embodiments of the present invention, and are not to be construed as limiting in any way the remainder of the disclosure.

### EXAMPLES

### Example 1

### Preparation of HA-hGH Fusion Proteins

[0918] An HA-hGH fusion protein was prepared as follows:

[0919] Cloning of hGH cDNA

[0920] The hGH cDNA was obtained from a human pituitary gland cDNA library (catalogue number HL1097v, Clontech Laboratories, Inc) by PCR amplification. Two oligonucleotides suitable for PCR amplification of the hGH cDNA, HGH1 and HGH2, were synthesized using an Applied Biosystems 380B Oligonucleotide Synthesizer.

(SEQ ID NO: 1)

HGH1: 5′-CCCAAGAATTCCCTTATCCAGGC-3′

(SEQ ID NO: 2)

HGH2: 5′-GGGAAGCTTAGAAGCCACAGGATCCCTCCACAG-3′

[0921] HGH1 and HGH2 differed from the equivalent portion of the hGH cDNA sequence (Martial et. al., 1979) by two and three nucleotides, respectively, such that after PCR amplification an EcoRI site would be introduced to the 5′ end of the cDNA and a BamH1 site would be introduced into the 3′ end of the cDNA. In addition, HGH2 contained a HindIII site immediately downstream of the hGH sequence.

[0922] PCR amplification using a Perkin-Elmer-Cetus Thermal Cycler 9600 and a Perkin-Elmer-Cetus PCR kit, was performed using single-stranded DNA template isolated from the phage particles of the cDNA library as follows: 10 μL phage particles were lysed by the addition of 10 μL phage lysis buffer (280 μg/mL proteinase K in TE buffer) and incubation at 55° C. for 15 min followed by 85° C. for 15 min. After a 1 min. incubation on ice, phage debris was pelleted by centrifugation at 14,000 rpm for 3 min. The PCR mixture contained 6 μL of this DNA template, 0.1 μM of each primer and 200 μM of each deoxyribonucleotide. PCR was carried out for 30 cycles, denaturing at 94° C. for 30 s, annealing at 65° C. for 30 s and extending at 72° C. for 30 s, increasing the extension time by 1 s per cycle.

[0923] Analysis of the reaction by gel electrophoresis showed a single product of the expected size (589 base pairs).

[0924] The PCR product was purified using Wizard PCR Preps DNA Purification System (Promega Corp) and then digested with EcoR1 and HindIII. After further purification of the EcoR1-HindIII fragment by gel electrophoresis, the product was cloned into pUC19 (GIBCO BRL) digested with EcoRI and HindIII, to give pHGH1. DNA sequencing of the EcoR1 HindIII region showed that the PCR product was identical in sequence to the hGH sequence (Martial et al., 1979), except at the 5′ and 3′ ends, where the EcoR1 and BamHI sites had been introduced, respectively.

[0925] Expression of the hGH cDNA.

[0926] The polylinker sequence of the phagemid pBluescribe(+) (Stratagene) was replaced by inserting an oligonucleotide linker, formed by annealing two 75-mer oligonucleotides, between the EcoRI and HindIII sites to form pBST(+). The new polylinker included a unique NotI site.

[0927] The NotI HA expression cassette of pAYE309 (EP 431 880) comprising the PRBI promoter, DNA encoding the HA/MF□-I hybrid leader sequence, DNA encoding HA and the ADH1 terminator, was transferred to pBST(+) to form pHA1. The HA coding sequence was removed from this plasmid by digestion with HindIII followed by religation to form pHA2.

[0928] Cloning of the hGH cDNA, as described in Example 1, provided the hGH coding region lacking the pro-hGH sequence and the first 8 base pairs (bp) of the mature hGH sequence. In order to construct an expression plasmid for secretion of hGH from yeast, a yeast promoter, signal peptide and the first 8 by of the hGH sequence were attached to the 5′ end of the cloned hGH sequence as follows: The HindIII-SfaNI fragment from pHA1 was attached to the 5′ end of the EcoRI/HindIII fragment from pHGHI via two synthetic oligonucleotides, HGH3 and HGH4 (which can anneal to one another in such a way as to generate a double stranded fragment of DNA with sticky ends that can anneal with SfaNI and EcoRI sticky ends):

| | |
|---|---|
| HGH3: 5′-GATAAAGATTCCCAAC-3′ | (SEQ ID NO: 3) |
| HGH4: 5′-AATTGTTGGGAATCTTT-3′ | (SEQ ID NO: 4) |

[0929] The HindIII fragment so formed was cloned into HindIII-digested pHA2 to make pHGH2, such that the hGH cDNA was positioned downstream of the PRBI promoter and HA/MF□-1 fusion leader sequence (WO 90/01063). The Not1 expression cassette contained in pHGH2, which included the ADH1 terminator downstream of the hGH cDNA, was cloned into NotI-digested pSAC35 (Sleep et al., BioTechnology 8:42 (1990)) to make pHGH12. This plasmid comprised the entire 2 μm plasmid to provide replication functions and the LEU2 gene for selection of transformants.

[0930] pHGH12 was introduced into S. cerevisiae D88 by transformation and individual transformants were grown for 3 days at 30° C. in 10 mL YEPD (1% w/v yeast extract, 2% w/v, peptone, 2% w/v, dextrose).

[0931] After centrifugation of the cells, the supernatants were examined by SDS-polyacrylamide gel electrophoresis (SDS-PAGE) and were found to contain protein which was of the expected size and which was recognized by anti-hGH antiserum (Sigma, Poole, UK) on Western blots.

[0932] Cloning and Expression of an HA-hGH Fusion Protein.

[0933] In order to fuse the HA cDNA to the 5′ end of the hGH cDNA, the pHA1 HindIII-Bsu361 fragment (containing most of the HA cDNA) was joined to the pHGH1 EcoRI-HindIII fragment (containing most of the hGH cDNA) via two oligonucleotides, HGH7 and HGH8

| | |
|---|---|
| HGH7: 5′-TTAGGCTTATTCCCAAC 3′ | (SEQ ID NO: 5) |
| HGH8: 5′-AATTGTTGGGAATAAGCC 3′ | (SEQ ID NO: 6) |

[0934] The HindIII fragment so formed was cloned into pHA2 digested with HindIII to make pHGH10, and the Not1 expression cassette of this plasmid was cloned into Not1-digested pSAC35 to make pHGH16.

[0935] pHGH16 was used to transform S. cerevisiae D88 and supernatants of cultures were analyzed as described above. A predominant band was observed that had a molecular weight of approximately 88 kD, corresponding to the combined masses of HA and hGH. Western blotting using anti-HA and anti-hGH antisera (Sigma) confirmed the presence of the two constituent parts of the albumin fusion protein.

[0936] The albumin fusion protein was purified from culture supernatant by cation exchange chromatography, followed by anion exchange and gel permeation chromatography. Analysis of the N-terminus of the protein by amino acid sequencing confirmed the presence of the expected albumin sequence.

[0937] An in vitro growth hormone activity assay (Ealey et al., Growth Regulation 5:36 (1995)) indicated that the albumin fusion protein possessed full hGH activity. In a hypophysectomised rat weight gain model, performed essentially as described in the European Pharmacopoeia (1987, monograph 556), the fusion molecule was more potent than hGH when the same number of units of activity (based on the above in vitro assay) were administered daily. Further experiments in which the albumin fusion protein was administered once every four days showed a similar overall growth response to a daily administration of hGH. Pharmacokinetic experiments in which ¹²⁵I-labeled protein was administered to rats indicated an approximately ten-fold increase in circulatory half-life for the albumin fusion protein compared to hGH.

[0938] A similar plasmid was constructed in which DNA encoding the S. cerevisiae invertase (SUC2) leader sequence replaced the sequence for the hybrid leader, such that the encoded leader and the junction (←) with the HA sequence were as follows:

(SEQ ID NO: 7)
. . . MLLQAFLFLLAGFAAKISA ↓ DAHKS . . .
Invertase leader HA sequence . . .

[0939] On introduction into S. cerevisiae DBI, this plasmid directed the expression and secretion of the albumin fusion protein at a level similar to that obtained with pHGH16. Analysis of the N-terminus of the albumin fusion protein indicated precise and efficient cleavage of the leader sequence from the mature protein.

[0940] Cloning and Expression of an hGH-HA Fusion Protein.

[0941] In order to fuse the hGH cDNA to the 5′ end of the HA cDNA, the HA cDNA was first altered by site-directed mutagenesis to introduce an EcoN1 site near the 5′ end of the coding region. This was done by the method of Kunkel et al. (Methods in Enzymol. 154:367 (1987)) using single-stranded DNA template prepared from pHAI and a synthetic oligonucleotide, LEU4:

(SEQ ID NO: 8)

LEU4: 5′-GAGATGCACACCTGAGTGAGG-3′

[0942] Site-directed mutagenesis using this oligonucleotide changed the coding sequence of the HA cDNA from Lys4 to Leu4 (K4L). However, this change was repaired when the hGH cDNA was subsequently joined at the 5′ end by linking the pHGH2 Not1-BamHI fragment to the EcoNI-Not1 fragment of the mutated pHAI, via the two oligonucleotides HGH5 and HGH6:

(SEQ ID NO: 9)

HGH5: 5′-GATCCTGTGGCTTCGATGCACACAAGA-3′

(SEQ ID NO: 10)

HGH6: 5′-CTCTTGTGTGCATCGAAGCCACAG-3′

[0943] The Not1 fragment so formed was cloned into Not1-digested pSAC35 to make pHGH14. pHGH14 was used to transform S. cerevisiae D88 and supernatants of culture were analyzed as above. A predominant band was observed that had a molecular weight of approximately 88 kD, corresponding to the combined masses of hGH and HA. Western blotting using anti-HA and anti-hGH antisera confirmed the presence of the two constituent parts of the albumin fusion protein.

[0944] The albumin fusion protein was purified from culture supernatant by cation exchange chromatography, followed by anion exchange and gel permeation chromatography. Analysis of the N-terminus of the protein by amino acid sequencing confirmed the presence of the expected hGH sequence.

[0945] In vitro studies showed that the albumin fusion protein retained hGH activity, but was significantly less potent than an albumin fusion protein comprising full length HA (1-585) as the N-terminal portion and hGH as the C-terminal portion, as described above.

[0946] Construction of Plasmids for the Expression of hGH Fusions to Domains of HA.

[0947] Fusion polypeptides were made in which the hGH molecule was fused to the first two domains of HA (residues 1 to 387). Fusion to the N terminus of hGH was achieved by joining the pHA1 HindIII-Sap1 fragment, which contained most of the coding sequence for domains 1 and 2 of HA, to the pHGHI EcoR1-HindIII fragment, via the oligonucleotides HGH 11 and HGH 12:

(SEQ ID NO: 11)

HGH11: 5′-TGTGGAAGAGCCTCAGAATTTATTCCCAAC-3′

(SEQ ID NO: 12)

HGH12: 5′-AATTGTTGGGAATAAATTCTGAGGCTCTTCC-3′

[0948] The HindIII fragment so formed was cloned into HindIII-digested pHA2 to make pHGH37 and the Not1 expression cassette of this plasmid was cloned into Not1-digested pSAC35.

[0949] The resulting plasmid, pHGH38, contained an expression cassette that was found to direct secretion of the fusion polypeptide into the supernatant when transformed into S. cerevisiae DB 1. Western blotting using anti-HA and anti-hGH antisera confirmed the presence of the two constituent parts of the albumin fusion protein.

[0950] The albumin fusion protein was purified from culture supernatant by cation exchange chromatography followed by gel permeation chromatography.

[0951] In vivo studies with purified protein indicated that the circulatory half-life was longer than that of hGH, and similar to that of an albumin fusion protein comprising full-length HA (1-585) as the N-terminal portion and hGH as the C-terminal portion, as described above. In vitro studies showed that the albumin fusion protein retained hGH activity.

[0952] Using a similar strategy as detailed above, an albumin fusion protein comprising the first domain of HA (residues 1-194) as the N-terminal portion and hGH as the C-terminal portion, was cloned and expressed in S. cerevisiae DBL. Western blotting of culture supernatant using anti-HA and anti-hGH antisera confirmed the presence of the two constituent parts of the albumin fusion protein.

[0953] Fusion of HA to hGH Using a Flexible Linker Sequence

[0954] Flexible linkers, comprising repeating units of [Gly-Gly-Gly-Gly-Ser]ₙ, where n was either 2 or 3, were introduced between the HA and hGH albumin fusion protein by cloning of the oligonucleotides HGH16. HGH17, HGH18 and HGH19:

(SEQ ID NO: 13)

HGH16: 5′-TTAGGCTTAGGTGGCGGTGGATCCGGCGGTGGTGGATCT
TTCCCAAC-3′

(SEQ ID NO: 14)

HGH17: 5′-AATTGTTGGGAAAGATCCACCACCGCCGGATCCACCGC
CACCTAAGCC-3′

(SEQ ID NO: 15)

HGH18: 5′-TTAGGCTTAGGCGGTGGTGGATCTGGTGGCGGCGGATCT
GGTGGCGGTGGATCCTTCCCAAC-3′

(SEQ ID NO: 16)

HGH19: 5′-AATTGTTGGGAAGGATCCACCGCCACCAGATCCGCCGC
CACCAGATCCACCACCGCCTAAGCC-3′

[0955] Annealing of HGH16 with HGH17 resulted in n=2, while HGH18 annealed to HGH19 resulted in n=3. After annealing, the double-stranded oligonucleotides were cloned with the EcoRI-Bsu361 fragment isolated from pHGH1 into Bsu361-digested pHGH10 to make pHGH56 (where n=2) and pHGH57 (where n=3). The Not1 expression cassettes from these plasmids were cloned into NotI-digested pSAC35 to make pHGH58 and pHGH59, respectively.

[0956] Cloning of the oligonucleotides to make pHGH56 and pHGH57 introduced a BamHI site in the linker sequences. It was therefore possible to construct linker sequences in which n=1 and n=4, by joining either the HindIII-BamH1 fragment from pHGH56 to the BamHI-HindIII fragment from pHGH57 (making n=1), or the HindIII-BamHI fragment from pHGH57 to the BamHI-HindIII fragment from pHGH56 (making n=2). Cloning of these fragments into the Hindi site of pHA2, resulted in pHGH60 (n=1) and pHGH61 (n=4). The Not1 expression cassettes from pHGH60 and pHGH61 were cloned into Not1-digested pSAC35 to make pHGH62 and pHGH63, respectively.

[0957] Transformation of S. cerevisiae with pHGH58, pHGH59, pHGH62 and pHGH63 resulted in transformants that secreted the fusion polypeptides into the supernatant. Western blotting using anti-HA and anti-hGH antisera confirmed the presence of the two constituent parts of the albumin fusion proteins.

[0958] The albumin fusion proteins were purified from culture supernatant by cation exchange chromatography, followed by anion exchange and gel permeation chromatography. Analysis of the N-termini of the proteins by amino acid sequencing confirmed the presence of the expected albumin sequence. Analysis of the purified proteins by electrospray mass spectrometry confirmed an increase in mass of 315 D (n=1), 630 D (n=2), 945 D (n=3) and 1260 D (n=4) compared to the HA-hGH fusion protein described above. The purified protein was found to be active in vitro.

[0959] Increased Shelf-Life of HA-hGH Fusion Proteins: Methods

[0960] HA-hGH and hGH were separately diluted in cell culture media containing 5% horse serum to final concentrations of 100-200 μg/ml and incubated at 4, 37 or 50° C. At time zero and at weekly intervals thereafter, aliquots of the samples were tested for their biological activity in the Nb2 cell proliferation assay, and the data normalized to the biological activity of the control (hGH solution at time zero). In other assays hGH and HA-hGH were incubated in phosphate buffer saline in at 4, 37 and 50 degree C.

[0961] Nb2 cell proliferation assay: The growth of these cells is dependent on hGH or other lactogenic hormones. In a typical experiment 10⁴ cells/well are plated in 96-well plate in the presence of different concentration of hGH or HA-hGH in media such as DMEM containing 5-10% horse serum for 24-48 hrs in the incubator. After the incubation period, 1:10 volume of MTT (5 mg/ml in H₂O) is added to each well and the plate is incubated for a further 6-16 hrs. The growing cells convert MTT to insoluble formazan. The formazan is solublized by acidic isopropanol, and the color produced is measured at 570 nm on microliter plate reader. The extent of formazan formation reflects the level of cellular proliferation.

[0962] Increased Shelf-Life of HA-hGH Fusion Proteins: Results

[0963] The fusion of Therapeutic proteins to albumin confers stability in aqueous or other solution. FIG. 1 depicts the extended shelf-life of an HA fusion protein in terms of the biological activity of HA-hGH remaining after storage in cell culture media for up to 5 weeks at 37° C. A solution of 200 μg/ml HA-hGH was prepared in tissue culture media containing 5% horse serum, and the solution incubated at 37° C. starting at time zero. At the indicated times, a sample was removed and tested for its biological activity in the Nb2 cell assay, at 2 ng/ml final concentration. As shown in FIG. 1, the biological activity of HA-hGH remains essentially intact (within experimental variation) after 5 weeks of incubation at 37° C. The recombinant hGH used as control for this experiment lost its biological activity in the first week of the experiment.

[0964] FIG. 2 shows the stability of HA-hGH after storage in cell culture media for up to 3 weeks at 4, 37, or 50° C. At time zero, a solution of HA-hGH was prepared in tissue culture media containing 5% horse serum, and incubated at 4, 37, and 50° C. At the indicated periods a sample was removed and assayed for its biological activity in the Nb2 cell proliferation assay, at 60 ng/ml final concentration. HA-hGH retains over 90% of its initial activity at all temperatures tested for at least 3 weeks after incubation while hGH loses its biological activity within the first week. This level of activity is further retained for at least 7 weeks at 37° C. and 5 weeks at 50° C. These results indicate that HA-hGH is highly stable in aqueous solution even under temperature stress.

[0965] FIGS. 3A and 3B show the stable biological activity of HA-hGH compared to hGH in the Nb2 cell proliferation assay. Nb2 cells were grown in the presence of increasing concentrations of recombinant hGH or HA-hGH, added at time zero. The cells were incubated for 24 or 48 hours before measuring the extent of proliferation by the MTT method. The increased stability of HA-hGH in the assay results in essentially the same proliferative activity at 24 hours (FIG. 3A) as at 48 hours (FIG. 3B) while hGH shows a significant reduction in its proliferative activity after 48 hours of incubation (FIGS. 3A and 3B). Compared to hGH, the HA-hGH has lower biological potency after 1 day; the albumin fusion protein is about 5 fold less potent than hGH. However, after 2 days the HA-hGH shows essentially the same potency as hGH due to the short life of hGH in the assay. This increase in the stability of the hGH as an albumin fusion protein has a major unexpected impact on the biological activity of the protein. Although the potency of the albumin fusion proteins is slightly lower than the unfused counterparts in rapid bioassays, their biological stability results in much higher biological activity in the longer term in vitro assay or in vivo assays.

### Example 2

### Preparation of HA-Fusion Proteins

[0966] FIG. 4 shows a map of a plasmid (pPPC0005) that can be used as the base vector for cloning the cDNAs of therapeutic partners to form HA-fusions. For example, digestion of this vector with the restriction enzymes Bsu36I/Partial HindIII will allow for the insertion of a cDNA modified at the 5′ end to encode the last 5 amino acids of HA including the Bsu36I site and at the 3′ end to include a double stop codon and HindIII site. As another example, digestion of this vector with the restriction enzymes Bsu361I, SphI allows for the insertion of a cDNA modified at the 5′ end to encode the last 5 amino acids of HA including the Bsu36I site and at the 3′ end to include a double stop codon, HindIII site and the ADHI terminator sequence up to and including the SphI site.

[0967] This plasmid may easily be modified by one of skill in the art, for example, to modify, add or delete restriction sites so that one may more easily clone a Therapeutic protein, or fragment or variant of into the vector for the purpose of making an albumin fusion protein of the invention.

[0968] For example, for the purpose of making an albumin fusion protein where the Therapeutic moiety is placed N-terminal to the (mature) albumin protein, restriction sites were added at the 5′ end of the DNA encoding HA in pPPC0005 shown in FIG. 4).

[0969] Because it was desired to add unique XhoI and ClaI sites at the 5′ end of the DNA encoding the HA protein in pPPC0005, it was first necessary to remove those same sites from the plasmid (located 3′ of the ADH1 terminator sequence). This was accomplished by cutting pPPC0005 with XhoI and ClaI, filling in the sticky ends with T4 DNA polymerase, and religating the blunt ends to create pPPC0006

[0970] Engineering the Xho and Cla I restriction sites into the Fusion leader sequence just 5′ of the DNA encoding the HA protein in pPPC0006 was accomplished using two rounds of PCR. The first pair of oligonucleotides are those of SEQ ID NO:19 and SEQ ID NO:20. SEQ ID 19 contains four point mutations relative to the DNA sequence encoding the Fusion leaadr sequence and the beginning of the HA protein. These mutations are necessary to create the XhoI site in the fusion leader sequence and the Cla I site just at the beginning of the DNA encoding the HA protein. These four mutations are underlined in the sequence shown below. In pPPC0006 the nucleotides at these four positions from 5′ to 3′ are T, G, T, and G.

(SEQ ID NO: 19)

5′-GCCTCGAGAAAAGAGATGCACACAAGAGTGAGGTTGCTCATCGATT
TAAAGATTTGGG-3′;

(SEQ ID NO: 20)

5′-AATCGATGAGCAACCTCACTCTTGTGTGCATCTCTTTTCTCGAGGC
TCCTGGAATAAGC-3′.

A second round of PCR is then performed with an upstream flanking primer, 5′-TACAAACTTAAGAGTCCAATTAGC-3′ (SEQ ID NO:21) and a downstream flanking primer 5′-CACTTCTCTAGAGTGGTTTCATATGTCTT-3′ (SEQ ID NO:22). The resulting PCR product is then purified and then digested with AflI and XbaI and ligated into the same sites in pPPC0006 creating pScCHSA. The resulting plasmid will have an XhoI sites engineered into the fusion leader sequence. The presence of the XhoI site creates a single amino acid change in the end of fusion leader sequence from LDKR to LEKR. The D to E change will not be present in the final albumin fusion protein expression plasmid if one ligates into the XhoI and Cla I sites a fragment comprising the Therapeutic moiety which has a 5′ SalI sticky end (which is compatible with the XhoI end) and a 3′ ClaI end. Ligation of the XhoI to the SalI restores the original amino acid sequence of the Fusion leader sequence. The therapeutic protein moiety may be inserted after the Kex2 site (Kex2 claeves after the dibasic amino acid sequence KR at the end of the Fusion leader sequence) and before the ClaI site.

[0971] In addition, for the purpose of making an albumin fusion protein where the Therapeutic moiety is placed C-terminal to the (mature) albumin protein, four, eight-base-pair restriction sites were added at the 3′ end of the DNA encoding HA in pScCHSA. As an example, it was felt to be desirable to incorporate AscI, FseI, and PmeI restriction sites in between the Bsu36I and HindIII sites at the end of the DNA encoding the HA protein in pScCHSA. This was accomplished through the use of two complementary synthetic oligonucleotides (SEQ ID NO:19 and SEQ ID NO:20) which contain the desired restriction sites.

(SEQ ID NO: 23)

5′-AAGCTGCCTTAGGCTTATAATAAGGCGCGCCGGCCGGCCGTTTAAA
CTAAGCTTA ATTCT-3′
and

(SEQ ID NO: 24)

5-AGAATTAAGCTTAGTTTAAACGGCCGGCCGGCGCGCCTTATTATAAG
CCTAAGGCAGCTT-3′.

These oligonucleotides may be annealed and digested with Bsu36I and HindIII and ligated into the same sites located at the end of the DNA encoding the HA protein in pScCHSA creating pScNHSA, using techniques known in the art.

[0972] Making Vectors Comprising Albumin Fusion Proteins where the Albumin Moiety is N-Terminal to the Therapeutic Moiety.

[0973] The DNA encoding the Therapeutic moiety may be PCR amplified using primers that will add DNA encoding the last five amino acids of the HA (and containing the Bsu36I site) onto the 5′ end of the DNA encoding a Therapeutic protein and a STOP codon and appropriate cloning sites onto the 3′ end of the coding sequence. For instance, the forward primer used to amplify the DNA encoding a therapeutic protein might have the sequence, 5′-aagctGCCTTAGGCTTA(N)₁₅-3′ (SEQ ID NO:25) where the underlined sequence is a Bsu36I site, the upper case nucleotides encode the last four amino acids of the mature HA protein (ALGL), and (N)₁₅ is identical to the first 15 nucleotides encoding the Therapetic protein of interest. Similarly, the reverse primer used to amplify the DNA encoding a therapeutic protein might have the sequence,

(SEQ ID NO: 26)

5′-GCGCGCGTTTAAACGGCCGGCCGGCGCGC [symbol] (N)₁₅-3′

where the italicized nucleotides is a PmeI site, the double underlined nucleotides are a FseI site, the singly underlined text is a PmeI site, the boxed nucleotides are the reverse complement of two tandem stop codons, and (N)₁₅ is identical to the reverse complement of the last 15 nucleotides encoding the Therapeutic protein of interest. Once the PCR product is amplified it may be cut with Bsu36I and one of (AscI, FseI, or PmeI) and ligated into pScNHSA.

[0974] Making Vectors Comprising Albumin Fusion Proteins where the Albumin Moiety is N-Terminal to the Therapeutic Moiety.

[0975] The DNA encoding the Therapeutic moiety may be PCR amplified using primers that will add DNA encoding the last three amino acids of the Fusion leader sequence (and containing a SalI site) onto the 5′ end of the DNA encoding a Therapeutic protein and the first few amino acids of the HA (and containing a ClaI site. For instance, the forward primer used to amplify the DNA encoding a therapeutic protein might have the sequence, 5′-aggagcgtcGACAAAAGA(N)₁₅-3′ (SEQ ID NO:27) where the underlined sequence is a Sal I site, the upper case nucleotides encode the last three amino acids of the Fusion leader sequence (DKR), and (N)₁₅ is identical to the first 15 nucleotides encoding the Therapetic protein of interest. Similarly, the reverse primer used to amplify the DNA encoding a therapeutic protein might have the sequence,

(SEQ ID NO: 28)

5′-CTTTAAATCGATGAGCAACCTCACTCTTGTGTGCATC(N)₁₅-3′

where the italicized nucleotides are a ClaI site, the underlined nucleotides are the reverse complement of the DNA encoding the first 9 amino acids of HA (DAHKSEVAH), and (N)₁₅ is identical to the reverse complement of the last 15 nucleotides encoding the Therapeutic protein of interest. Once the PCR product is amplified it may be cut with Sail and ClaI and ligated into pScCHSA digested with XhoI and Cla I.

[0976] Expression of an Albumin Fusion Protein in Yeast.

[0977] The Not I fragment containing the DNA encoding either an N-terminal or C-terminal albumin fusion protein generated from pScCHSA or pScNHSA may then be cloned in to the NotI site of pSAC35.

[0978] Expression of an Albumin Fusion Protein from Mammalian Cell Lines

[0979] The HSA gene has also been cloned into a the pC4 vector which is more suitable for mammalian culture systems creating plasmid pC4:HSA. More specifically, pC4HSA was generated by PCR amplifying the mature HSA gene with a 5′ primer (SEQ ID NO:30) that anneals to the 5′ end of DNA encoding the mature form of the HSA protein (e.g, DNA in plasmid pScCHSA), incorporates BamHI (Shown in italics below) and HindIII (shown singly underlined below) cloning sites, attaches a kozak sequence (shown double underlined below) and DNA encoding the natural HSA signal peptide (MKWVSFISLLFLFSSAYSRSLDKR, SEQ ID NO:29) (shown in bold below), and a 3′ primer (SEQ ID NO:31) that anneals to the 3′ end of DNA encoding the mature form of the HSA protein and incorporates an Asp718 restriction site (shown in bold below). The DNA encoding the natural human serum albumin leader sequence in SEQ ID NO:30 also contains a modification that introduces a XhoI site that is boxed below.

(SEQ ID NO: 30)

5′-TCAGGGATCCAAGCTTCCGCCACCATGAAGTGGGTAACCTTTATTT
CCCTTCTTTTTCTCTTTAGCTCGGCTTA [symbol] GGGTGTGTTTCGTCGAGAT
GCACACAAGAGTGAG-3′
(SEQ ID NO: 31)
5″-GCAGCGGTACCGAATTCGGCGCGCCTTATAAGCCTAAGGCAGC-3′

[0980] This PCR product (1.85 kb) is then purified and digested with BamHI and Asp718 and cloned into the same sites in pC4 (ATCC Accession No. 209646) to produce pC4:HSA

[0981] Making Vectors Comprising Albumin Fusion Proteins where the Albumin Moiety is C-Terminal to the Therapeutic Moiety Using the pC4:HSA Vector

[0982] Using pC4:HSA, albumin fusion proteins in which the Therapeutic protein moiety is N terminal to the albumin sequence, one can clone DNA encoding a Therapeutic protein that has its own signal sequence between the Bam HI (or HindIII) and ClaI sites. When cloning into either the BamHI or Hind III site remember to include Kozak sequence (CCGCCACCATG) prior to translational start codon of DNA encoding the Therapeutic Protein to be subcloned. If the Therapeutic does not have a signal sequence, the DNA encoding that Therapeutic protein may be cloned in between the XhoI and ClaI sites. When using the XhoI site, the following 5′ (SEQ ID NO:32) and 3′ (SEQ ID NO:33) PCR primers may be used:

(SEQ ID NO: 32)

5′-CCGCCGCTCGAGGGGTGTGTTTCGTCGA(N)₁₈-3′

(SEQ ID NO: 33)

5′-AGTCCCATCGATGAGCAACCTCACTCTTGTGTGCATC(N)₁₈-3′

[0983] In SEQ ID NO:32, the underlined sequence is an XhoI site; and the XhoI site and the DNA following the XhoI site encode for the last seven amino acids of the leader sequence of natural human serum albumin. In SEQ ID NO:33, the underlined sequence is a ClaI site; and the ClaI site and the DNA following it encode are the reverse complement of the DNA encoding the first 10 amino acids of the mature HSA protein (SEQ ID NO:18). In SEQ ID NO:32 “(N)₁₈” is DNA identical to the first 18 nucleotides encoding the Therapeutic protein of interest). In SEQ ID NO:33 “(N)₁₈” is the reverse complement of DNA encoding the last 18 nucleotides encoding the Therapeutic protein of interest. Using these two primers, one may PCR amplify the Therapeutic protein of interest, purify the PCR product, digest it with XhoI and ClaI restriction enzymes and then and clone it into the with XhoI and ClaI sites in the pC4:HSA vector.

[0984] Making Vectors Comprising Albumin Fusion Proteins where the Albumin Moiety is N-Terminal to the Therapeutic Moiety Using the pC4:HSA Vector

[0985] Using pC4:HSA, albumin fusion proteins in which the Therapeutic protein moiety is N terminal to the albumin sequence, one can clone DNA encoding a Therapeutic protein between the Bsu36I and AscI restriction sites. When cloning into the Bsu36I and AscI, the same primer design used to clone in the yeast vector system (SEQ ID NO:25 and 26) may be employed.

[0986] The pC4 vector is especially suitable for expression of albumin fusion proteins from CHO cells. For expression, in other mammalian cell types, e.g., NSO cells, it may be useful to subclone the HindIII-EcoRI fragment containing the DNA encoding an albumin fusion protein (from a pC4 vector in which the DNA encoding the Therapeutic protein has already been cloned in frame with the DNA encoding (the mature form of) human serum albumin) into another expression vector (such as any of the mammalian expression vectors described herein).

### Example 3

### Preparation of HA-Cytokine or HA-Growth Factor Fusion Proteins (such as EPO, GMCSF, GCSF)

[0987] The cDNA for the cytokine or growth factor of interest, such as EPO, can be isolated by a variety of means including from cDNA libraries, by RT-PCR and by PCR using a series of overlapping synthetic oligonucleotide primers, all using standard methods. The nucleotide sequences for all of these proteins are known and available, for instance, in U.S. Pat. Nos. 4,703,008, 4,810,643 and 5,908,763. The cDNA can be tailored at the 5′ and 3′ ends to generate restriction sites, such that oligonucleotide linkers can be used, for cloning of the cDNA into a vector containing the cDNA for HA. This can be at the N or C-terminus with or without the use of a spacer sequence. EPO (or other cytokine) cDNA is cloned into a vector such as pPPC0005 (FIG. 4), pScCHSA, pScNHSA, or pC4:HSA from which the complete expression cassette is then excised and inserted into the plasmid pSAC35 to allow the expression of the albumin fusion protein in yeast. The albumin fusion protein secreted from the yeast can then be collected and purified from the media and tested for its biological activity. For expression in mammalian cell lines, a similar procedure is adopted except that the expression cassette used employs a mammalian promoter, leader sequence and terminator (See Example 2). This expression cassette is then excised and inserted into a plasmid suitable for the transfection of mammalian cell lines.

### Example 4

### Preparation of HA-IFN Fusion Proteins (Such as IFNα)

[0988] The cDNA for the interferon of interest such as IFNα can be isolated by a variety of means including but not exclusively, from cDNA libraries, by RT-PCR and by PCR using a series of overlapping synthetic oligonucleotide primers, all using standard methods. The nucleotide sequences for interferons, such as IFNα are known and available, for instance, in U.S. Pat. Nos. 5,326,859 and 4,588,585, in EP 32 134, as well as in public databases such as GenBank. The cDNA can be tailored at the 5′ and 3′ ends to generate restriction sites, such that oligonucleotide linkers can be used to clone the cDNA into a vector containing the cDNA for HA. This can be at the N or C-terminus of the HA sequence, with or without the use of a spacer sequence. The IFNα (or other interferon) cDNA is cloned into a vector such as pPPC0005 (FIG. 4), pScCHSA, pScNHSA, or pC4:HSA from which the complete expression cassette is then excised and inserted into the plasmid pSAC35 to allow the expression of the albumin fusion protein in yeast (see FIG. 8). The albumin fusion protein secreted from the yeast can then be collected and purified from the media and tested for its biological activity. For expression in mammalian cell lines a similar procedure is adopted except that the expression cassette used employs a mammalian promoter, leader sequence and terminator (See Example 2). This expression cassette is then excised and inserted into a plasmid suitable for the transfection of mammalian cell lines.

[0989] Maximum Protein Recovery from Vials

[0990] The albumin fusion proteins of the invention have a high degree of stability even when they are packaged at low concentrations. In addition, in spite of the low protein concentration, good fusion-protein recovery is observed even when the aqueous solution includes no other protein added to minimize binding to the vial walls. FIG. 5 compares the recovery of vial-stored HA-IFN solutions with a stock solution. 6 or 30 μg/ml HA-IFN solutions were placed in vials and stored at 4° C. After 48 or 72 hrs a volume originally equivalent to 10 ng of sample was removed and measured in an IFN sandwich ELISA. The estimated values were compared to that of a high concentration stock solution. As shown, there is essentially no loss of the sample in these vials, indicating that addition of exogenous material such as albumin is not necessary to prevent sample loss to the wall of the vials

[0991] In Vivo Stability and Bioavailability of HA-α-IFN Fusions

[0992] To determine the in vivo stability and bioavailability of a HA-α-IFN fusion molecule, the purified fusion molecule (from yeast) was administered to monkeys at the dosages and time points described in FIGS. 6 and 7. Pharmaceutical compositions formulated from HA-α-IFN fusions may account for the extended serum half-life and bioavailability exemplified in FIGS. 6 and 7. Accordingly, pharmaceutical compositions may be formulated to contain lower dosages of alpha-interferon activity compared to the native alpha-interferon molecule.

[0993] Pharmaceutical compositions containing HA-α-IFN fusions may be used to treat or prevent disease in patients with any disease or disease state that can be modulated by the administration of α-IFN. Such diseases include, but are not limited to, hairy cell leukemia, Kaposi's sarcoma, genital and anal warts, chronic hepatitis B, chronic non-A, non-B hepatitis, in particular hepatitis C, hepatitis D, chronic myelogenous leukemia, renal cell carcinoma, bladder carcinoma, ovarian and cervical carcinoma, skin cancers, recurrent respirator papillomatosis, non-Hodgkin's and cutaneous T-cell lymphomas, melanoma, multiple myeloma, AIDS, multiple sclerosis, gliobastoma, etc. (see Interferon Alpha, In: AHFS Drug Information, 1997.

[0994] Accordingly, the invention includes pharmaceutical compositions containing a HA-α-IFN fusion protein, polypeptide or peptide formulated with the proper dosage for human administration. The invention also includes methods of treating patients in need of such treatment comprising at least the step of administering a pharmaceutical composition containing at least one HA-α-IFN fusion protein, polypeptide or peptide.

[0995] Bifunctional HA-α-IFN Fusions

[0996] The HA-α-IFN expression vector of FIG. 8 is modified to include an insertion for the expression of bifunctional HA-α-IFN fusion proteins. For instance, the cDNA for a second protein of interest may be inserted in frame downstream of the “rHA-IFN” sequence after the double stop codon has been removed or shifted downstream of the coding sequence.

[0997] In one version of a bifunctional HA-α-IFN fusion protein, an antibody or fragment against B-lymphocyte stimulator protein (GenBank Acc 4455139) or polypeptide may be fused to one end of the HA component of the fusion molecule. This bifunctional protein is useful for modulating any immune response generated by the α-IFN component of the fusion.

### Example 5

### Preparation of HA-Hormone Fusion Protein (Such as Insulin, LH, FSH)

[0998] The cDNA for the hormone of interest such as insulin can be isolated by a variety of means including but not exclusively, from cDNA libraries, by RT-PCR and by PCR using a series of overlapping synthetic oligonucleotide primers, all using standard methods. The nucleotide sequences for all of these proteins are known and available, for instance, in public databases such as GenBank. The cDNA can be tailored at the 5′ and 3′ ends to generate restriction sites, such that oligonucleotide linkers can be used, for cloning of the cDNA into a vector containing the cDNA for HA. This can be at the N or C-terminus with or without the use of a spacer sequence. The hormone cDNA is cloned into a vector such as pPPC0005 (FIG. 4), pScCHSA, pScNHSA, or pC4:HSA from which the complete expression cassette is then excised and inserted into the plasmid pSAC35 to allow the expression of the albumin fusion protein in yeast. The albumin fusion protein secreted from the yeast can then be collected and purified from the media and tested for its biological activity. For expression in mammalian cell lines a similar procedure is adopted except that the expression cassette used employs a mammalian promoter, leader sequence and terminator (See Example 2). This expression cassette is then excised and inserted into a plasmid suitable for the transfection of mammalian cell lines.

### Example 6

### Preparation of HA-Soluble Receptor or HA-Binding Protein Fusion Protein Such as HA-TNF Receptor

[0999] The cDNA for the soluble receptor or binding protein of interest such as TNF receptor can be isolated by a variety of means including but not exclusively, from cDNA libraries, by RT-PCR and by PCR using a series of overlapping synthetic oligonucleotide primers, all using standard methods. The nucleotide sequences for all of these proteins are known and available, for instance, in GenBank. The cDNA can be tailored at the 5′ and 3′ ends to generate restriction sites, such that oligonucleotide linkers can be used, for cloning of the cDNA into a vector containing the cDNA for HA. This can be at the N or C-terminus with or without the use of a spacer sequence. The receptor cDNA is cloned into a vector such as pPPC0005 (FIG. 4), pScCHSA, pScNHSA, or pC4:HSA from which the complete expression cassette is then excised and inserted into the plasmid pSAC35 to allow the expression of the albumin fusion protein in yeast. The albumin fusion protein secreted from the yeast can then be collected and purified from the media and tested for its biological activity. For expression in mammalian cell lines a similar procedure is adopted except that the expression cassette used employs a mammalian promoter, leader sequence and terminator (See Example 2). This expression cassette is then excised and inserted into a plasmid suitable for the transfection of mammalian cell lines.

### Example 7

### Preparation of HA-Growth Factors Such as HA-IGF-1 Fusion Protein

[1000] The cDNA for the growth factor of interest such as IGF-1 can be isolated by a variety of means including but not exclusively, from cDNA libraries, by RT-PCR and by PCR using a series of overlapping synthetic oligonucleotide primers, all using standard methods (see GenBank Acc. No. NP_{—}000609). The cDNA can be tailored at the 5′ and 3′ ends to generate restriction sites, such that oligonucleotide linkers can be used, for cloning of the cDNA into a vector containing the cDNA for HA. This can be at the N or C-terminus with or without the use of a spacer sequence. The growth factor cDNA is cloned into a vector such as pPPC0005 (FIG. 4), pScCHSA, pScNHSA, or pC4:HSA from which the complete expression cassette is then excised and inserted into the plasmid pSAC35 to allow the expression of the albumin fusion protein in yeast. The albumin fusion protein secreted from the yeast can then be collected and purified from the media and tested for its biological activity. For expression in mammalian cell lines a similar procedure is adopted except that the expression cassette used employs a mammalian promoter, leader sequence and terminator (See Example 2). This expression cassette is then excised and inserted into a plasmid suitable for the transfection of mammalian cell lines.

### Example 8

### Preparation of HA-Single Chain Antibody Fusion Proteins

[1001] Single chain antibodies are produced by several methods including but not limited to: selection from phage libraries, cloning of the variable region of a specific antibody by cloning the cDNA of the antibody and using the flanking constant regions as the primer to clone the variable region, or by synthesizing an oligonucleotide corresponding to the variable region of any specific antibody. The cDNA can be tailored at the 5′ and 3′ ends to generate restriction sites, such that oligonucleotide linkers can be used, for cloning of the cDNA into a vector containing the cDNA for HA. This can be at the N or C-terminus with or without the use of a spacer sequence. The cell cDNA is cloned into a vector such as pPPC0005 (FIG. 4), pScCHSA, pScNHSA, or pC4:HSA from which the complete expression cassette is then excised and inserted into the plasmid pSAC35 to allow the expression of the albumin fusion protein in yeast.

[1002] In fusion molecules of the invention, the V_{H} and V_{L} can be linked by one of the following means or a combination thereof: a peptide linker between the C-terminus of the V_{H} and the N-terminus of the V_{L}; a Kex2p protease cleavage site between the V_{H} and V_{L} such that the two are cleaved apart upon secretion and then self associate; and cystine residues positioned such that the V_{H} and V_{L} can form a disulphide bond between them to link them together (see FIG. 14). An alternative option would be to place the V_{H} at the N-terminus of HA or an HA domain fragment and the V_{L} at the C-terminus of the HA or HA domain fragment.

[1003] The albumin fusion protein secreted from the yeast can then be collected and purified from the media and tested for its activity. For expression in mammalian cell lines a similar procedure is adopted except that the expression cassette used employs a mammalian promoter, leader sequence and terminator (See Example 2). This expression cassette is then excised and inserted into a plasmid suitable for the transfection of mammalian cell lines. The antibody produced in this manner can be purified from media and tested for its binding to its antigen using standard immunochemical methods.

### Example 9

### Preparation of HA-Cell Adhesion Molecule Fusion Proteins

[1004] The cDNA for the cell adhesion molecule of interest can be isolated by a variety of means including but not exclusively, from cDNA libraries, by RT-PCR and by PCR using a series of overlapping synthetic oligonucleotide primers, all using standard methods. The nucleotide sequences for the known cell adhesion molecules are known and available, for instance, in GenBank. The cDNA can be tailored at the 5′ and 3′ ends to generate restriction sites, such that oligonucleotide linkers can be used, for cloning of the cDNA into a vector containing the cDNA for HA. This can be at the N or C-terminus with or without the use of a spacer sequence. The cell adhesion molecule cDNA is cloned into a vector such as pPPC0005 (FIG. 4), pScCHSA, pScCHSA, or pC4:HSA from which the complete expression cassette is then excised and inserted into the plasmid pSAC35 to allow the expression of the albumin fusion protein in yeast. The albumin fusion protein secreted from the yeast can then be collected and purified from the media and tested for its biological activity. For expression in mammalian cell lines a similar procedure is adopted except that the expression cassette used employs a mammalian promoter, leader sequence and terminator (See Example 2). This expression cassette is then excised and inserted into a plasmid suitable for the transfection of mammalian cell lines.

### Example 10

### Preparation of Inhibitory Factors and Peptides as HA Fusion Proteins (Such as HA-Antiviral, HA-Antibiotic, HA-Enzyme Inhibitor and HA-Anti-Allergic Proteins)

[1005] The cDNA for the peptide of interest such as an antibiotic peptide can be isolated by a variety of means including but not exclusively, from cDNA libraries, by RT-PCR and by PCR using a series of overlapping synthetic oligonucleotide primers, all using standard methods. The cDNA can be tailored at the 5′ and 3′ ends to generate restriction sites, such that oligonucleotide linkers can be used, for cloning of the cDNA into a vector containing the cDNA for HA. This can be at the N or C-terminus with or without the use of a spacer sequence. The peptide cDNA is cloned into a vector such as pPPC0005 (FIG. 4), pScCHSA, pScNHSA, or pC4:HSA from which the complete expression cassette is then excised and inserted into the plasmid pSAC35 to allow the expression of the albumin fusion protein in yeast. The albumin fusion protein secreted from the yeast can then be collected and purified from the media and tested for its biological activity. For expression in mammalian cell lines a similar procedure is adopted except that the expression cassette used employs a mammalian promoter, leader sequence and terminator (See Example 2). This expression cassette is then excised and inserted into a plasmid suitable for the transfection of mammalian cell lines.

### Example 11

### Preparation of Targeted HA Fusion Proteins

[1006] The cDNA for the protein of interest can be isolated from cDNA library or can be made synthetically using several overlapping oligonucleotides using standard molecular biology methods. The appropriate nucleotides can be engineered in the cDNA to form convenient restriction sites and also allow the attachment of the protein cDNA to albumin cDNA similar to the method described for hGH. Also a targeting protein or peptide cDNA such as single chain antibody or peptides, such as nuclear localization signals, that can direct proteins inside the cells can be fused to the other end of albumin. The protein of interest and the targeting peptide is cloned into a vector such as pPPC0005 (FIG. 4), pScCHSA, pScNHSA, or pC4:HSA which allows the fusion with albumin cDNA. In this manner both N- and C-terminal end of albumin are fused to other proteins. The fused cDNA is then excised from pPPC0005 and is inserted into a plasmid such as pSAC35 to allow the expression of the albumin fusion protein in yeast. All the above procedures can be performed using standard methods in molecular biology. The albumin fusion protein secreted from yeast can be collected and purified from the media and tested for its biological activity and its targeting activity using appropriate biochemical and biological tests.

### Example 12

### Preparation of HA-Enzymes Fusions

[1007] The cDNA for the enzyme of interest can be isolated by a variety of means including but not exclusively, from cDNA libraries, by RT-PCR and by PCR using a series of overlapping synthetic oligonucleotide primers, all using standard methods. The cDNA can be tailored at the 5′ and 3′ ends to generate restriction sites, such that oligonucleotide linkers can be used, for cloning of the cDNA into a vector containing the cDNA for HA. This can be at the N or C-terminus with or without the use of a spacer sequence. The enzyme cDNA is cloned into a vector such as pPPC0005 (FIG. 4), pScCHSA, pScNHSA, or pC4:HSA from which the complete expression cassette is then excised and inserted into the plasmid pSAC35 to allow the expression of the albumin fusion protein in yeast. The albumin fusion protein secreted from the yeast can then be collected and purified from the media and tested for its biological activity. For expression in mammalian cell lines a similar procedure is adopted except that the expression cassette used employs a mammalian promoter, leader sequence and terminator (See Example 2). This expression cassette is then excised and inserted into a plasmid suitable for the transfection of mammalian cell lines.

### Example 13

### Bacterial Expression of an Albumin Fusion Protein

[1008] A polynucleotide encoding an albumin fusion protein of the present invention comprising a bacterial signal sequence is amplified using PCR oligonucleotide primers corresponding to the 5′ and 3′ ends of the DNA sequence, to synthesize insertion fragments. The primers used to amplify the polynucleotide encoding insert should preferably contain restriction sites, such as BamHI and XbaI, at the 5′ end of the primers in order to clone the amplified product into the expression vector. For example, BamHI and XbaI correspond to the restriction enzyme sites on the bacterial expression vector pQE-9. (Qiagen, Inc., Chatsworth, Calif.). This plasmid vector encodes antibiotic resistance (Amp^{r}), a bacterial origin of replication (ori), an IPTG-regulatable promoter/operator (P/O), a ribosome binding site (RBS), a 6-histidine tag (6-His), and restriction enzyme cloning sites.

[1009] The pQE-9 vector is digested with BamHI and XbaI and the amplified fragment is ligated into the pQE-9 vector maintaining the reading frame initiated at the bacterial RBS. The ligation mixture is then used to transform the E. coli strain M15/rep4 (Qiagen, Inc.) which contains multiple copies of the plasmid pREP4, which expresses the lacI repressor and also confers kanamycin resistance (Kan^{r}). Transformants are identified by their ability to grow on LB plates and ampicillin/kanamycin resistant colonies are selected. Plasmid DNA is isolated and confirmed by restriction analysis.

[1010] Clones containing the desired constructs are grown overnight (O/N) in liquid culture in LB media supplemented with both Amp (100 ug/ml) and Kan (25 ug/ml). The O/N culture is used to inoculate a large culture at a ratio of 1:100 to 1:250. The cells are grown to an optical density 600 (O.D.⁶⁰⁰) of between 0.4 and 0.6. IPTG (Isopropyl-B-D-thiogalacto pyranoside) is then added to a final concentration of 1 mM. IPTG induces by inactivating the lad repressor, clearing the P/O leading to increased gene expression.

[1011] Cells are grown for an extra 3 to 4 hours. Cells are then harvested by centrifugation (20 mins at 6000×g). The cell pellet is solubilized in the chaotropic agent 6 Molar Guanidine HCl or preferably in 8 M urea and concentrations greater than 0.14 M 2-mercaptoethanol by stirring for 3-4 hours at 4° C. (see, e.g., Burton et al., Eur. J. Biochem. 179:379-387 (1989)). The cell debris is removed by centrifugation, and the supernatant containing the polypeptide is loaded onto a nickel-nitrilo-tri-acetic acid (“Ni-NTA”) affinity resin column (available from QIAGEN, Inc., supra). Proteins with a 6×His tag bind to the Ni-NTA resin with high affinity and can be purified in a simple one-step procedure (for details see: The QIAexpressionist (1995) QIAGEN, Inc., supra).

[1012] Briefly, the supernatant is loaded onto the column in 6 M guanidine-HCl, pH 8. The column is first washed with 10 volumes of 6 M guanidine-HCl, pH 8, then washed with 10 volumes of 6 M guanidine-HCl pH 6, and finally the polypeptide is eluted with 6 M guanidine-HCl, pH 5.

[1013] The purified protein is then renatured by dialyzing it against phosphate-buffered saline (PBS) or 50 mM Na-acetate, pH 6 buffer plus 200 mM NaCl. Alternatively, the protein can be successfully refolded while immobilized on the Ni-NTA column. Exemplary conditions are as follows: renature using a linear 6M-1M urea gradient in 500 mM NaCl, 20% glycerol, 20 mM Tris/HCl pH 7.4, containing protease inhibitors. The renaturation should be performed over a period of 1.5 hours or more. After renaturation the proteins are eluted by the addition of 250 mM immidazole. Immidazole is removed by a final dialyzing step against PBS or 50 mM sodium acetate pH 6 buffer plus 200 mM NaCl. The purified protein is stored at 4° C. or frozen at −80° C.

[1014] In addition to the above expression vector, the present invention further includes an expression vector, called pHE4a (ATCC Accession Number 209645, deposited on Feb. 25, 1998) which contains phage operator and promoter elements operatively linked to a polynucleotide encoding an albumin fusion protein of the present invention, called pHE4a. (ATCC Accession Number 209645, deposited on Feb. 25, 1998.) This vector contains: 1) a neomycinphosphotransferase gene as a selection marker, 2) an E. coli origin of replication, 3) a T5 phage promoter sequence, 4) two lac operator sequences, 5) a Shine-Delgarno sequence, and 6) the lactose operon repressor gene (lacIq). The origin of replication (oriC) is derived from pUC19 (LTI, Gaithersburg, Md.). The promoter and operator sequences are made synthetically.

[1015] DNA can be inserted into the pHE4a by restricting the vector with NdeI and XbaI, BamHI, XhoI, or Asp718, running the restricted product on a gel, and isolating the larger fragment (the stuffer fragment should be about 310 base pairs). The DNA insert is generated according to PCR protocols described herein or otherwise known in the art, using PCR primers having restriction sites for NdeI (5′ primer) and XbaI, BamHI, XhoI, or Asp718 (3′ primer). The PCR insert is gel purified and restricted with compatible enzymes. The insert and vector are ligated according to standard protocols.

[1016] The engineered vector may be substituted in the above protocol to express protein in a bacterial system.

### Example 14

### Expression of an Albumin Fusion Protein in Mammalian Cells

[1017] The albumin fusion proteins of the present invention can be expressed in a mammalian cell. A typical mammalian expression vector contains a promoter element, which mediates the initiation of transcription of mRNA, a protein coding sequence, and signals required for the termination of transcription and polyadenylation of the transcript. Additional elements include enhancers, Kozak sequences and intervening sequences flanked by donor and acceptor sites for RNA splicing. Highly efficient transcription is achieved with the early and late promoters from SV40, the long terminal repeats (LTRs) from Retroviruses, e.g., RSV, HTLVI, HIVI and the early promoter of the cytomegalovirus (CMV). However, cellular elements can also be used (e.g., the human actin promoter).

[1018] Suitable expression vectors for use in practicing the present invention include, for example, vectors such as, pSVL and pMSG (Pharmacia, Uppsala, Sweden), pRSVcat (ATCC 37152), pSV2dhfr (ATCC 37146), pBC12MI (ATCC 67109), pCMVSport 2.0, and pCMVSport 3.0. Mammalian host cells that could be used include, but are not limited to, human Hela, 293, H9 and Jurkat cells, mouse NIH3T3 and C127 cells, Cos 1, Cos 7 and CV1, quail QC1-3 cells, mouse L cells and Chinese hamster ovary (CHO) cells.

[1019] Alternatively, the albumin fusion protein can be expressed in stable cell lines containing the polynucleotide encoding the albumin fusion protein integrated into a chromosome. The co-transfection with a selectable marker such as DHFR, gpt, neomycin, or hygromycin allows the identification and isolation of the transfected cells.

[1020] The transfected polynucleotide encoding the fusion protein can also be amplified to express large amounts of the encoded fusion protein. The DHFR (dihydrofolate reductase) marker is useful in developing cell lines that carry several hundred or even several thousand copies of the gene of interest. (See, e.g., Alt et al., J. Biol. Chem. 253:1357-1370 (1978); Hamlin et al., Biochem. et Biophys. Acta, 1097:107-143 (1990); Page et al., Biotechnology 9:64-68 (1991)). Another useful selection marker is the enzyme glutamine synthase (GS) (Murphy et al., Biochem J. 227:277-279 (1991); Bebbington et al., Bio/Technology 10:169-175 (1992). Using these markers, the mammalian cells are grown in selective medium and the cells with the highest resistance are selected. These cell lines contain the amplified gene(s) integrated into a chromosome. Chinese hamster ovary (CHO) and NSO cells are often used for the production of proteins.

[1021] Derivatives of the plasmid pSV2-dhfr (ATCC Accession No. 37146), the expression vectors pC4 (ATCC Accession No. 209646) and pC6 (ATCC Accession No. 209647) contain the strong promoter (LTR) of the Rous Sarcoma Virus (Cullen et al., Molecular and Cellular Biology, 438-447 (March, 1985)) plus a fragment of the CMV-enhancer (Boshart et al., Cell 41:521-530 (1985)). Multiple cloning sites, e.g., with the restriction enzyme cleavage sites BamHI, XbaI and Asp718, facilitate the cloning of the gene of interest. The vectors also contain the 3′ intron, the polyadenylation and termination signal of the rat preproinsulin gene, and the mouse DHFR gene under control of the SV40 early promoter.

[1022] Specifically, the plasmid pC6, for example, is digested with appropriate restriction enzymes and then dephosphorylated using calf intestinal phosphates by procedures known in the art. The vector is then isolated from a 1% agarose gel.

[1023] A polynucleotide encoding an albumin fusion protein of the present invention is generated using techniques known in the art and this polynucleotide is amplified using PCR technology known in the art. If a naturally occurring signal sequence is used to produce the fusion protein of the present invention, the vector does not need a second signal peptide. Alternatively, if a naturally occurring signal sequence is not used, the vector can be modified to include a heterologous signal sequence. (See, e.g., International Publication No. WO 96/34891.)

[1024] The amplified fragment encoding the fusion protein of the invention is isolated from a 1% agarose gel using a commercially available kit (“Geneclean,” BIO 101 Inc., La Jolla, Calif.). The fragment then is digested with appropriate restriction enzymes and again purified on a 1% agarose gel.

[1025] The amplified fragment encoding the albumin fusion protein of the invention is then digested with the same restriction enzyme and purified on a 1% agarose gel. The isolated fragment and the dephosphorylated vector are then ligated with T4 DNA ligase. E. coli HB101 or XL-1 Blue cells are then transformed and bacteria are identified that contain the fragment inserted into plasmid pC6 using, for instance, restriction enzyme analysis.

[1026] Chinese hamster ovary cells lacking an active DHFR gene is used for transfection. Five μg of the expression plasmid pC6 or pC4 is cotransfected with 0.5 μg of the plasmid pSVneo using lipofectin (Felgner et al., supra). The plasmid pSV2-neo contains a dominant selectable marker, the neo gene from Tn5 encoding an enzyme that confers resistance to a group of antibiotics including G418. The cells are seeded in alpha minus MEM supplemented with 1 mg/ml G418. After 2 days, the cells are trypsinized and seeded in hybridoma cloning plates (Greiner, Germany) in alpha minus MEM supplemented with 10, 25, or 50 ng/ml of methotrexate plus 1 mg/ml G418. After about 10-14 days single clones are trypsinized and then seeded in 6-well petri dishes or 10 ml flasks using different concentrations of methotrexate (50 nM, 100 nM, 200 nM, 400 nM, 800 nM). Clones growing at the highest concentrations of methotrexate are then transferred to new 6-well plates containing even higher concentrations of methotrexate (1 μM, 2 μM, 5 μM, 10 mM, 20 mM). The same procedure is repeated until clones are obtained which grow at a concentration of 100-200 μM. Expression of the desired fusion protein is analyzed, for instance, by SDS-PAGE and Western blot or by reversed phase HPLC analysis.

### Example 15

### Multifusion Fusions

[1027] The albumin fusion proteins (e.g., containing a Therapeutic protein (or fragment or variant thereof) fused to albumin (or a fragment or variant thereof)) may additionally be fused to other proteins to generate “multifusion proteins”. These multifusion proteins can be used for a variety of applications. For example, fusion of the albumin fusion proteins of the invention to His-tag, HA-tag, protein A, IgG domains, and maltose binding protein facilitates purification. (See e.g., EP A 394,827; Traunecker et al., Nature 331:84-86 (1988)). Nuclear localization signals fused to the polypeptides of the present invention can target the protein to a specific subcellular localization, while covalent heterodimer or homodimers can increase or decrease the activity of an albumin fusion protein. Furthermore, the fusion of additional protein sequences to the albumin fusion proteins of the invention may further increase the solubility and/or stability of the fusion protein. The fusion proteins described above can be made using or routinely modifting techniques known in the art and/or by modifying the following protocol, which outlines the fusion of a polypeptide to an IgG molecule.

[1028] Briefly, the human Fc portion of the IgG molecule can be PCR amplified, using primers that span the 5′ and 3′ ends of the sequence described below. These primers also should have convenient restriction enzyme sites that will facilitate cloning into an expression vector, preferably a mammalian or yeast expression vector.

[1029] For example, if pC4 (ATCC Accession No. 209646) is used, the human Fc portion can be ligated into the BamHI cloning site. Note that the 3′ BamHI site should be destroyed. Next, the vector containing the human Fc portion is re-restricted with BamHI, linearizing the vector, and a polynucleotide encoding an albumin fusion protein of the present invention (generateed and isolated using techniques known in the art), is ligated into this BamHI site. Note that the polynucleotide encoding the fusion protein of the invention is cloned without a stop codon, otherwise a Fc containing fusion protein will not be produced.

[1030] If the naturally occurring signal sequence is used to produce the albumin fusion protein of the present invention, pC4 does not need a second signal peptide. Alternatively, if the naturally occurring signal sequence is not used, the vector can be modified to include a heterologous signal sequence. (See, e.g., International Publication No. WO 96/34891.)

[1031] Human IgG Fc region:

(SEQ ID NO: 36)
GGGATCCGGAGCCCAAATCTTCTGACAAAACTCACACATGCCCACCGTGCCCAG
CACCTGAATTCGAGGGTGCACCGTCAGTCTTCCTCTTCCCCCCAAAACCCAAGGACAC
CCTCATGATCTCCCGGACTCCTGAGGTCACATGCGTGGTGGTGGACGTAAGCCACG
AAGACCCTGAGGTCAAGTTCAACTGGTACGTGGACGGCGTGGAGGTGCATAATGC
CAAGACAAAGCCGCGGGAGGAGCAGTACAACAGCACGTACCGTGTGGTC
AGCGTCCTCACCGTCCTGCACCAGGACTGGCTGAATGGCAAGGAGTACAAGTGC
AAGGTCTCCAACAAAGCCCTCCCAACCCCCATCGAGAAAACCATCTCCAAAGCCAAAGGG
CAGCCCCGAGAACCACAGGTGTACACCCTGCCCCCATCCCGGGATGAGCTGAC
CAAGAACCAGGTCAGCCTGACCTGCCTGGTCAAAGGCTTCTATCCAAGC
GACATCGCCGTGGAGTGGGAGAGCAATGGGCAGCCGGAGAACAACTACAAGAC
CACGCCTCCCGTGCTGGACTCCGACGGCTCCTTCTTCCTCTACAGCAAGCTCACC
GTGGACAAGAGCAGGTGGCAGCAGGGGAACGTCTTCTCATGCTCCGTGATGCAT
GAGGCTCTGCACAACCACTACACGCAGAAGAGCCTCTCCCTGTCTCCGGGTAAATGAGT
GCGACGGCCGCGACTCTAGAGGAT

### Example 16

### Production of an Antibody from an Albumin Fusion Protein

[1032] a) Hybridoma Technology

[1033] Antibodies that bind the albumin fusion proteins of the present invention and portions of the albumin fusion proteins of the present invention (e.g., the Therapeutic protein portion or albumin portion of the fusion protein) can be prepared by a variety of methods. (See, Current Protocols, Chapter 2.) As one example of such methods, a preparation of an albumin fusion protein of the invention or a portion of an albumin fusion protein of the invention is prepared and purified to render it substantially free of natural contaminants. Such a preparation is then introduced into an animal in order to produce polyclonal antisera of greater specific activity.

[1034] Monoclonal antibodies specific for an albumin fusion protein of the invention, or a portion of an albumin fusion protein of the invention, are prepared using hybridoma technology (Kohler et al., Nature 256:495 (1975); Kohler et al., Eur. J. Immunol. 6:511 (1976); Kohler et al., Eur. J. Immunol. 6:292 (1976); Hammerling et al., in: Monoclonal Antibodies and T-Cell Hybridomas, Elsevier, N.Y., pp. 563-681 (1981)). In general, an animal (preferably a mouse) is immunized with an albumin fusion protein of the invention, or a portion of an albumin fusion protein of the invention. The splenocytes of such mice are extracted and fused with a suitable myeloma cell line. Any suitable myeloma cell line may be employed in accordance with the present invention; however, it is preferable to employ the parent myeloma cell line (SP2O), available from the ATCC. After fusion, the resulting hybridoma cells are selectively maintained in HAT medium, and then cloned by limiting dilution as described by Wands et al. (Gastroenterology 80:225-232 (1981)). The hybridoma cells obtained through such a selection are then assayed to identify clones which secrete antibodies capable of binding an albumin fusion protein of the invention, or a portion of an albumin fusion protein of the invention.

[1035] Alternatively, additional antibodies capable of binding to an albumin fusion protein of the invention, or a portion of an albumin fusion protein of the invention can be produced in a two-step procedure using anti-idiotypic antibodies. Such a method makes use of the fact that antibodies are themselves antigens, and therefore, it is possible to obtain an antibody which binds to a second antibody. In accordance with this method, protein specific antibodies are used to immunize an animal, preferably a mouse. The splenocytes of such an animal are then used to produce hybridoma cells, and the hybridoma cells are screened to identify clones which produce an antibody whose ability to bind to the an albumin fusion protein of the invention (or portion of an albumin fusion protein of the invention)-specific antibody can be blocked by the fusion protein of the invention, or a portion of an albumin fusion protein of the invention. Such antibodies comprise anti-idiotypic antibodies to the fusion protein of the invention (or portion of an albumin fusion protein of the invention)-specific antibody and are used to immunize an animal to induce formation of further fusion protein of the invention (or portion of an albumin fusion protein of the invention)-specific antibodies.

[1036] For in vivo use of antibodies in humans, an antibody is “humanized”. Such antibodies can be produced using genetic constructs derived from hybridoma cells producing the monoclonal antibodies described above. Methods for producing chimeric and humanized antibodies are known in the art and are discussed herein. (See, for review, Morrison, Science 229:1202 (1985); Oi et al., BioTechniques 4:214 (1986); Cabilly et al., U.S. Pat. No. 4,816,567; Taniguchi et al., EP 171496; Morrison et al., EP 173494; Neuberger et al., WO 8601533; Robinson et al., International Publication No. WO 8702671; Boulianne et al., Nature 312:643 (1984); Neuberger et al., Nature 314:268 (1985)).

[1037] b) Isolation Of Antibody Fragments Directed Against an albumin fusion protein of the invention, or a portion of an albumin fusion protein of the invention From A Library Of scFvs

[1038] Naturally occurring V-genes isolated from human PBLs are constructed into a library of antibody fragments which contain reactivities against an albumin fusion protein of the invention, or a portion of an albumin fusion protein of the invention, to which the donor may or may not have been exposed (see e.g., U.S. Pat. No. 5,885,793 incorporated herein by reference in its entirety).

[1039] Rescue of the Library. A library of scFvs is constructed from the RNA of human PBLs as described in International Publication No. WO 92/01047. To rescue phage displaying antibody fragments, approximately 10⁹ E. coli harboring the phagemid are used to inoculate 50 ml of 2×TY containing 1% glucose and 100 μg/ml of ampicillin (2×TY-AMP-GLU) and grown to an O.D. of 0.8 with shaking. Five ml of this culture is used to inoculate 50 ml of 2×TY-AMP-GLU, 2×108 TU of delta gene 3 helper (M13 delta gene III, see International Publication No. WO 92/01047) are added and the culture incubated at 37° C. for 45 minutes without shaking and then at 37° C. for 45 minutes with shaking. The culture is centrifuged at 4000 r.p.m. for 10 min. and the pellet resuspended in 2 liters of 2×TY containing 100 μg/ml ampicillin and 50 ug/ml kanamycin and grown overnight. Phage are prepared as described in International Publication No. WO 92/01047.

[1040] M13 delta gene III is prepared as follows: M13 delta gene III helper phage does not encode gene III protein, hence the phage(mid) displaying antibody fragments have a greater avidity of binding to antigen. Infectious M13 delta gene III particles are made by growing the helper phage in cells harboring a pUC19 derivative supplying the wild type gene DI protein during phage morphogenesis. The culture is incubated for 1 hour at 37° C. without shaking and then for a further hour at 37° C. with shaking. Cells are spun down (IEC-Centra 8,400 r.p.m. for 10 min), resuspended in 300 ml 2×TY broth containing 100 μg ampicillin/ml and 25 μg kanamycin/ml (2×TY-AMP-KAN) and grown overnight, shaking at 37° C. Phage particles are purified and concentrated from the culture medium by two PEG-precipitations (Sambrook et al., 1990), resuspended in 2 ml PBS and passed through a 0.45 μm filter (Minisart NML; Sartorius) to give a final concentration of approximately 10¹³ transducing units/ml (ampicillin-resistant clones).

[1041] Panning of the Library. Immunotubes (Nunc) are coated overnight in PBS with 4 ml of either 100 μg/ml or 10 μg/ml of an albumin fusion protein of the invention, or a portion of an albumin fusion protein of the invention. Tubes are blocked with 2% Marvel-PBS for 2 hours at 37° C. and then washed 3 times in PBS. Approximately 10¹³ TU of phage is applied to the tube and incubated for 30 minutes at room temperature tumbling on an over and under turntable and then left to stand for another 1.5 hours. Tubes are washed 10 times with PBS 0.1% Tween-20 and 10 times with PBS. Phage are eluted by adding 1 ml of 100 mM triethylamine and rotating 15 minutes on an under and over turntable after which the solution is immediately neutralized with 0.5 ml of 1.0M Tris-HCl, pH 7.4. Phage are then used to infect 10 ml of mid-log E. coli TG1 by incubating eluted phage with bacteria for 30 minutes at 37° C. The E. coli are then plated on TYE plates containing 1% glucose and 100 μg/ml ampicillin. The resulting bacterial library is then rescued with delta gene 3 helper phage as described above to prepare phage for a subsequent round of selection. This process is then repeated for a total of 4 rounds of affinity purification with tube-washing increased to 20 times with PBS, 0.1% Tween-20 and 20 times with PBS for rounds 3 and 4.

[1042] Characterization of Binders. Eluted phage from the 3rd and 4th rounds of selection are used to infect E. coli HB 2151 and soluble scFv is produced (Marks, et al., 1991) from single colonies for assay. ELISAs are performed with microtitre plates coated with either 10 pg/ml of an albumin fusion protein of the invention, or a portion of an albumin fusion protein of the invention, in 50 mM bicarbonate pH 9.6. Clones positive in ELISA are further characterized by PCR fingerprinting (see, e.g., International Publication No. WO 92/01047) and then by sequencing. These ELISA positive clones may also be further characterized by techniques known in the art, such as, for example, epitope mapping, binding affinity, receptor signal transduction, ability to block or competitively inhibit antibody/antigen binding, and competitive agonistic or antagonistic activity.

### Example 17

### Method of Treatment Using Gene Therapy-Ex Vivo

[1043] One method of gene therapy transplants fibroblasts, which are capable of expressing an albumin fusion protein of the present invention, onto a patient. Generally, fibroblasts are obtained from a subject by skin biopsy. The resulting tissue is placed in tissue-culture medium and separated into small pieces. Small chunks of the tissue are placed on a wet surface of a tissue culture flask, approximately ten pieces are placed in each flask. The flask is turned upside down, closed tight and left at room temperature over night. After 24 hours at room temperature, the flask is inverted and the chunks of tissue remain fixed to the bottom of the flask and fresh media (e.g., Ham's F12 media, with 10% FBS, penicillin and streptomycin) is added. The flasks are then incubated at 37 degree C. for approximately one week.

[1044] At this time, fresh media is added and subsequently changed every several days. After an additional two weeks in culture, a monolayer of fibroblasts emerge. The monolayer is trypsinized and scaled into larger flasks.

[1045] pMV-7 (Kirschmeier, P. T. et al., DNA, 7:219-25 (1988)), flanked by the long terminal repeats of the Moloney murine sarcoma virus, is digested with EcoRI and HindIII and subsequently treated with calf intestinal phosphatase. The linear vector is fractionated on agarose gel and purified, using glass beads.

[1046] Polynucleotides encoding an albumin fusion protein of the invention can be generated using techniques known in the art amplified using PCR primers which correspond to the 5′ and 3′ end sequences and optionally having appropriate restriction sites and initiation/stop codons, if necessary. Preferably, the 5′ primer contains an EcoRI site and the 3′ primer includes a HindIII site. Equal quantities of the Moloney murine sarcoma virus linear backbone and the amplified EcoRI and HindIII fragment are added together, in the presence of T4 DNA ligase. The resulting mixture is maintained under conditions appropriate for ligation of the two fragments. The ligation mixture is then used to transform bacteria HB101, which are then plated onto agar containing kanamycin for the purpose of confirming that the vector has the gene of interest properly inserted.

[1047] The amphotropic pA317 or GP+am12 packaging cells are grown in tissue culture to confluent density in Dulbecco's Modified Eagles Medium (DMEM) with 10% calf serum (CS), penicillin and streptomycin. The MSV vector containing the gene is then added to the media and the packaging cells transduced with the vector. The packaging cells now produce infectious viral particles containing the gene (the packaging cells are now referred to as producer cells).

[1048] Fresh media is added to the transduced producer cells, and subsequently, the media is harvested from a 10 cm plate of confluent producer cells. The spent media, containing the infectious viral particles, is filtered through a millipore filter to remove detached producer cells and this media is then used to infect fibroblast cells. Media is removed from a sub-confluent plate of fibroblasts and quickly replaced with the media from the producer cells. This media is removed and replaced with fresh media. If the titer of virus is high, then virtually all fibroblasts will be infected and no selection is required. If the titer is very low, then it is necessary to use a retroviral vector that has a selectable marker, such as neo or his. Once the fibroblasts have been efficiently infected, the fibroblasts are analyzed to determine whether the albumin fusion protein is produced.

[1049] The engineered fibroblasts are then transplanted onto the host, either alone or after having been grown to confluence on cytodex 3 microcarrier beads.

### Example 18

### Method of Treatment Using Gene Therapy—In Vivo

[1050] Another aspect of the present invention is using in vivo gene therapy methods to treat disorders, diseases and conditions. The gene therapy method relates to the introduction of naked nucleic acid (DNA, RNA, and antisense DNA or RNA) sequences encoding an albumin fusion protein of the invention into an animal. Polynucleotides encoding albumin fusion proteins of the present invention may be operatively linked to (i.e., associated with) a promoter or any other genetic elements necessary for the expression of the polypeptide by the target tissue. Such gene therapy and delivery techniques and methods are known in the art, see, for example, WO90/11092, WO98/11779; U.S. Pat. No. 5,693,622, 5,705,151, 5,580,859; Tabata et al., Cardiovasc. Res. 35(3):470-479 (1997); Chao et al., Pharmacol. Res. 35(6):517-522 (1997); Wolff, Neuromuscul. Disord. 7(5):314-318 (1997); Schwartz et al., Gene Ther. 3(5):405-411 (1996); Tsurumi et al., Circulation 94(12):3281-3290 (1996) (incorporated herein by reference).

[1051] The polynucleotide constructs may be delivered by any method that delivers injectable materials to the cells of an animal, such as, injection into the interstitial space of tissues (heart, muscle, skin, lung, liver, intestine and the like). The polynucleotide constructs can be delivered in a pharmaceutically acceptable liquid or aqueous carrier.

[1052] The term “naked” polynucleotide, DNA or RNA, refers to sequences that are free from any delivery vehicle that acts to assist, promote, or facilitate entry into the cell, including viral sequences, viral particles, liposome formulations, lipofectin or precipitating agents and the like. However, polynucleotides encoding albumin fusion proteins of the present invention may also be delivered in liposome formulations (such as those taught in Felgner P. L. et al. (1995) Ann. NY Acad. Sci. 772:126-139 and Abdallah B. et al. (1995) Biol. Cell 85(1):1-7) which can be prepared by methods well known to those skilled in the art.

[1053] The polynucleotide vector constructs used in the gene therapy method are preferably constructs that will not integrate into the host genome nor will they contain sequences that allow for replication. Any strong promoter known to those skilled in the art can be used for driving the expression of DNA. Unlike other gene therapy techniques, one major advantage of introducing naked nucleic acid sequences into target cells is the transitory nature of the polynucleotide synthesis in the cells. Studies have shown that non-replicating DNA sequences can be introduced into cells to provide production of the desired polypeptide for periods of up to six months.

[1054] The polynucleotide construct can be delivered to the interstitial space of tissues within an animal, including muscle, skin, brain, lung, liver, spleen, bone marrow, thymus, heart, lymph, blood, bone, cartilage, pancreas, kidney, gall bladder, stomach, intestine, testis, ovary, uterus, rectum, nervous system, eye, gland, and connective tissue. Interstitial space of the tissues comprises the intercellular fluid, mucopolysaccharide matrix among the reticular fibers of organ tissues, elastic fibers in the walls of vessels or chambers, collagen fibers of fibrous tissues, or that same matrix within connective tissue ensheathing muscle cells or in the lacunae of bone. It is similarly the space occupied by the plasma of the circulation and the lymph fluid of the lymphatic channels. Delivery to the interstitial space of muscle tissue is preferred for the reasons discussed below. They may be conveniently delivered by injection into the tissues comprising these cells. They are preferably delivered to and expressed in persistent, non-dividing cells which are differentiated, although delivery and expression may be achieved in non-differentiated or less completely differentiated cells, such as, for example, stem cells of blood or skin fibroblasts. In vivo muscle cells are particularly competent in their ability to take up and express polynucleotides.

[1055] For the naked polynucleotide injection, an effective dosage amount of DNA or RNA will be in the range of from about 0.05 g/kg body weight to about 50 mg/kg body weight. Preferably the dosage will be from about 0.005 mg/kg to about 20 mg/kg and more preferably from about 0.05 mg/kg to about 5 mg/kg. Of course, as the artisan of ordinary skill will appreciate, this dosage will vary according to the tissue site of injection. The appropriate and effective dosage of nucleic acid sequence can readily be determined by those of ordinary skill in the art and may depend on the condition being treated and the route of administration. The preferred route of administration is by the parenteral route of injection into the interstitial space of tissues. However, other parenteral routes may also be used, such as, inhalation of an aerosol formulation particularly for delivery to lungs or bronchial tissues, throat or mucous membranes of the nose. In addition, naked polynucleotide constructs can be delivered to arteries during angioplasty by the catheter used in the procedure.

[1056] The dose response effects of injected polynucleotide in muscle in vivo is determined as follows. Suitable template DNA for production of mRNA coding for polypeptide of the present invention is prepared in accordance with a standard recombinant DNA methodology. The template DNA, which may be either circular or linear, is either used as naked DNA or complexed with liposomes. The quadriceps muscles of mice are then injected with various amounts of the template DNA.

[1057] Five to six week old female and male Balb/C mice are anesthetized by intraperitoneal injection with 0.3 ml of 2.5% Avertin. A 1.5 cm incision is made on the anterior thigh, and the quadriceps muscle is directly visualized. The template DNA is injected in 0.1 ml of carrier in a 1 cc syringe through a 27 gauge needle over one minute, approximately 0.5 cm from the distal insertion site of the muscle into the knee and about 0.2 cm deep. A suture is placed over the injection site for future localization, and the skin is closed with stainless steel clips.

[1058] After an appropriate incubation time (e.g., 7 days) muscle extracts are prepared by excising the entire quadriceps. Every fifth 15 um cross-section of the individual quadriceps muscles is histochemically stained for protein expression. A time course for fusion protein expression may be done in a similar fashion except that quadriceps from different mice are harvested at different times. Persistence of DNA in muscle following injection may be determined by Southern blot analysis after preparing total cellular DNA and HIRT supernatants from injected and control mice. The results of the above experimentation in mice can be used to extrapolate proper dosages and other treatment parameters in humans and other animals using naked DNA.

### Example 19

### Transgenic Animals

[1059] The albumin fusion proteins of the invention can also be expressed in transgenic animals. Animals of any species, including, but not limited to, mice, rats, rabbits, hamsters, guinea pigs, pigs, micro-pigs, goats, sheep, cows and non-human primates, e.g., baboons, monkeys, and chimpanzees may be used to generate transgenic animals. In a specific embodiment, techniques described herein or otherwise known in the art, are used to express fusion proteins of the invention in humans, as part of a gene therapy protocol.

[1060] Any technique known in the art may be used to introduce the polynucleotides encoding the albumin fusion proteins of the invention into animals to produce the founder lines of transgenic animals. Such techniques include, but are not limited to, pronuclear microinjection (Paterson et al., Appl. Microbiol. Biotechnol. 40:691-698 (1994); Carver et al., Biotechnology (NY) 11:1263-1270 (1993); Wright et al., Biotechnology (NY) 9:830-834 (1991); and Hoppe et al., U.S. Pat. No. 4,873,191 (1989)); retrovirus mediated gene transfer into germ lines (Van der Putten et al., Proc. Natl. Acad. Sci., USA 82:6148-6152 (1985)), blastocysts or embryos; gene targeting in embryonic stem cells (Thompson et al., Cell 56:313-321 (1989)); electroporation of cells or embryos (Lo, 1983, Mol. Cell. Biol. 3:1803-1814 (1983)); introduction of the polynucleotides of the invention using a gene gun (see, e.g., Ulmer et al., Science 259:1745 (1993); introducing nucleic acid constructs into embryonic pleuripotent stem cells and transferring the stem cells back into the blastocyst; and sperm-mediated gene transfer (Lavitrano et al., Cell 57:717-723 (1989); etc. For a review of such techniques, see Gordon, “Transgenic Animals,” Intl. Rev. Cytol. 115:171-229 (1989), which is incorporated by reference herein in its entirety.

[1061] Any technique known in the art may be used to produce transgenic clones containing polynucleotides encoding albumin fusion proteins of the invention, for example, nuclear transfer into enucleated oocytes of nuclei from cultured embryonic, fetal, or adult cells induced to quiescence (Campell et al., Nature 380:64-66 (1996); Wilmut et al., Nature 385:810-813 (1997)).

[1062] The present invention provides for transgenic animals that carry the polynucleotides encoding the albumin fusion proteins of the invention in all their cells, as well as animals which carry these polynucleotides in some, but not all their cells, i.e., mosaic animals or chimeric. The transgene may be integrated as a single transgene or as multiple copies such as in concatamers, e.g., head-to-head tandems or head-to-tail tandems. The transgene may also be selectively introduced into and activated in a particular cell type by following, for example, the teaching of Lasko et al. (Lasko et al., Proc. Natl. Acad. Sci. USA 89:6232-6236 (1992)). The regulatory sequences required for such a cell-type specific activation will depend upon the particular cell type of interest, and will be apparent to those of skill in the art. When it is desired that the polynucleotide encoding the fusion protein of the invention be integrated into the chromosomal site of the endogenous gene corresponding to the Therapeutic protein portion or ablumin portion of the fusion protein of the invention, gene targeting is preferred. Briefly, when such a technique is to be utilized, vectors containing some nucleotide sequences homologous to the endogenous gene are designed for the purpose of integrating, via homologous recombination with chromosomal sequences, into and disrupting the function of the nucleotide sequence of the endogenous gene. The transgene may also be selectively introduced into a particular cell type, thus inactivating the endogenous gene in only that cell type, by following, for example, the teaching of Gu et al. (Gu et al., Science 265:103-106 (1994)). The regulatory sequences required for such a cell-type specific inactivation will depend upon the particular cell type of interest, and will be apparent to those of skill in the art.

[1063] Once transgenic animals have been generated, the expression of the recombinant gene may be assayed utilizing standard techniques. Initial screening may be accomplished by Southern blot analysis or PCR techniques to analyze animal tissues to verify that integration of the polynucleotide encoding the fusion protein of the invention has taken place. The level of mRNA expression of the polynucleotide encoding the fusion protein of the invention in the tissues of the transgenic animals may also be assessed using techniques which include, but are not limited to, Northern blot analysis of tissue samples obtained from the animal, in situ hybridization analysis, and reverse transcriptase-PCR (rt-PCR). Samples of fusion protein-expressing tissue may also be evaluated immunocytochemically or immunohistochemically using antibodies specific for the fusion protein.

[1064] Once the founder animals are produced, they may be bred, inbred, outbred, or crossbred to produce colonies of the particular animal. Examples of such breeding strategies include, but are not limited to: outbreeding of founder animals with more than one integration site in order to establish separate lines; inbreeding of separate lines in order to produce compound transgenics that express the transgene at higher levels because of the effects of additive expression of each transgene; crossing of heterozygous transgenic animals to produce animals homozygous for a given integration site in order to both augment expression and eliminate the need for screening of animals by DNA analysis; crossing of separate homozygous lines to produce compound heterozygous or homozygous lines; and breeding to place the transgene (i.e., polynucleotide encoding an albumin fusion protein of the invention) on a distinct background that is appropriate for an experimental model of interest.

[1065] Transgenic animals of the invention have uses which include, but are not limited to, animal model systems useful in elaborating the biological function of fusion proteins of the invention and the Therapeutic protein and/or albumin component of the fusion protein of the invention, studying conditions and/or disorders associated with aberrant expression, and in screening for compounds effective in ameliorating such conditions and/or disorders.

### Example 20

### Assays Detecting Stimulation or Inhibition of B Cell Proliferation and Differentiation

[1066] Generation of functional humoral immune responses requires both soluble and cognate signaling between B-lineage cells and their microenvironment. Signals may impart a positive stimulus that allows a B-lineage cell to continue its programmed development, or a negative stimulus that instructs the cell to arrest its current developmental pathway. To date, numerous stimulatory and inhibitory signals have been found to influence B cell responsiveness including IL-2, IL-4, IL-5, IL-6, IL-7, IL10, IL-13, IL-14 and IL-15. Interestingly, these signals are by themselves weak effectors but can, in combination with various co-stimulatory proteins, induce activation, proliferation, differentiation, homing, tolerance and death among B cell populations.

[1067] One of the best studied classes of B-cell co-stimulatory proteins is the TNF-superfamily. Within this family CD40, CD27, and CD30 along with their respective ligands CD154, CD70, and CD153 have been found to regulate a variety of immune responses. Assays which allow for the detection and/or observation of the proliferation and differentiation of these B-cell populations and their precursors are valuable tools in determining the effects various proteins may have on these B-cell populations in terms of proliferation and differentiation. Listed below are two assays designed to allow for the detection of the differentiation, proliferation, or inhibition of B-cell populations and their precursors.

[1068] In Vitro Assay—Albumin fusion proteins of the invention (including fusion proteins containing fragments or variants of Therapeutic proteins and/or albumin or fragments or variants of albumin) can be assessed for its ability to induce activation, proliferation, differentiation or inhibition and/or death in B-cell populations and their precursors. The activity of an albumin fusion protein of the invention on purified human tonsillar B cells, measured qualitatively over the dose range from 0.1 to 10,000 ng/mL, is assessed in a standard B-lymphocyte co-stimulation assay in which purified tonsillar B cells are cultured in the presence of either formalin-fixed Staphylococcus aureus Cowan I (SAC) or immobilized anti-human IgM antibody as the priming agent. Second signals such as IL-2 and IL-15 synergize with SAC and IgM crosslinking to elicit B cell proliferation as measured by tritiated-thymidine incorporation. Novel synergizing agents can be readily identified using this assay. The assay involves isolating human tonsillar B cells by magnetic bead (MACS) depletion of CD3-positive cells. The resulting cell population is greater than 95% B cells as assessed by expression of CD45R(B220).

[1069] Various dilutions of each sample are placed into individual wells of a 96-well plate to which are added 10⁵ B-cells suspended in culture medium (RPMI 1640 containing 10% FBS, 5×10⁻⁵M 2ME, 100 U/ml penicillin, 10 ug/ml streptomycin, and 10⁻⁵ dilution of SAC) in a total volume of 150 ul. Proliferation or inhibition is quantitated by a 20 h pulse (1 uCi/well) with 3H-thymidine (6.7 Ci/mM) beginning 72 h post factor addition. The positive and negative controls are IL2 and medium respectively.

[1070] In vivo Assay—BALB/c mice are injected (i.p.) twice per day with buffer only, or 2 mg/Kg of an albumin fusion protein of the invention (including fusion proteins containing fragments or variants of Therapeutic proteins and/or albumin or fragments or variants of albumin). Mice receive this treatment for 4 consecutive days, at which time they are sacrificed and various tissues and serum collected for analyses. Comparison of H&E sections from normal spleens and spleens treated with the albumin fusion protein of the invention identify the results of the activity of the fusion protein on spleen cells, such as the diffusion of peri-arterial lymphatic sheaths, and/or significant increases in the nucleated cellularity of the red pulp regions, which may indicate the activation of the differentiation and proliferation of B-cell populations. Immunohistochemical studies using a B cell marker, anti-CD45R(B220), are used to determine whether any physiological changes to splenic cells, such as splenic disorganization, are due to increased B-cell representation within loosely defined B-cell zones that infiltrate established T-cell regions.

[1071] Flow cytometric analyses of the spleens from mice treated with the albumin fusion protein is used to indicate whether the albumin fusion protein specifically increases the proportion of ThB+, CD45R(B220) dull B cells over that which is observed in control mice.

[1072] Likewise, a predicted consequence of increased mature B-cell representation in vivo is a relative increase in serum Ig titers. Accordingly, serum IgM and IgA levels are compared between buffer and fusion protein treated mice.

[1073] The studies described in this example tested activity of fusion proteins of the invention. However, one skilled in the art could easily modify the exemplified studies to test the activity of fusion proteins and polynucleotides of the invention (e.g., gene therapy).

### Example 21

### T Cell Proliferation Assay

[1074] A CD3-induced proliferation assay is performed on PBMCs and is measured by the uptake of ³H-thymidine. The assay is performed as follows. Ninety-six well plates are coated with 100 μl/well of mAb to CD3 (HIT3a, Pharmingen) or isotype-matched control mAb (B33.1) overnight at 4 degrees C. (1 μg/ml in 0.05M bicarbonate buffer, pH 9.5), then washed three times with PBS. PBMC are isolated by F/H gradient centrifugation from human peripheral blood and added to quadruplicate wells (5×10⁴/well) of mAb coated plates in RPMI containing 10% FCS and P/S in the presence of varying concentrations of an albumin fusion protein of the invention (including fusion proteins containing fragments or variants of Therapeutic proteins and/or albumin or fragments or variants of albumin) (total volume 200 ul). Relevant protein buffer and medium alone are controls. After 48 hr. culture at 37 degrees C., plates are spun for 2 min. at 1000 rpm and 100 μl of supernatant is removed and stored −20 degrees C. for measurement of IL-2 (or other cytokines) if effect on proliferation is observed. Wells are supplemented with 100 ul of medium containing 0.5 uCi of ³H-thymidine and cultured at 37 degrees C. for 18-24 hr. Wells are harvested and incorporation of ³H-thymidine used as a measure of proliferation. Anti-CD3 alone is the positive control for proliferation. IL-2 (100 U/ml) is also used as a control which enhances proliferation. Control antibody which does not induce proliferation of T cells is used as the negative control for the effects of fusion proteins of the invention.

[1075] The studies described in this example tested activity of fusion proteins of the invention. However, one skilled in the art could easily modify the exemplified studies to test the activity of fusion proteins or polynucleotides of the invention (e.g., gene therapy).

### Example 22

### Effect of Fusion Proteins of the Invention on the Expression of MHC Class II, Costimulatory and Adhesion Molecules and Cell Differentiation of Monocytes and Monocyte-Derived Human Dendritic Cells

[1076] Dendritic cells are generated by the expansion of proliferating precursors found in the peripheral blood: adherent PBMC or elutriated monocytic fractions are cultured for 7-10 days with GM-CSF (50 ng/ml) and IL-4 (20 ng/ml). These dendritic cells have the characteristic phenotype of immature cells (expression of CD1, CD80, CD86, CD40 and MHC class II antigens). Treatment with activating factors, such as TNF-α, causes a rapid change in surface phenotype (increased expression of MHC class I and II, costimulatory and adhesion molecules, downregulation of FCγRII, upregulation of CD83). These changes correlate with increased antigen-presenting capacity and with functional maturation of the dendritic cells.

[1077] FACS analysis of surface antigens is performed as follows. Cells are treated 1-3 days with increasing concentrations of an albumin fusion protein of the invention or LPS (positive control), washed with PBS containing 1% BSA and 0.02 mM sodium azide, and then incubated with 1:20 dilution of appropriate FITC- or PE-labeled monoclonal antibodies for 30 minutes at 4 degrees C. After an additional wash, the labeled cells are analyzed by flow cytometry on a FACScan (Becton Dickinson).

[1078] Effect on the production of cytokines. Cytokines generated by dendritic cells, in particular IL-12, are important in the initiation of T-cell dependent immune responses. IL-12 strongly influences the development of Th1 helper T-cell immune response, and induces cytotoxic T and NK cell function. An ELISA is used to measure the IL-12 release as follows. Dendritic cells (10⁶/ml) are treated with increasing concentrations of an albumin fusion protein of the invention for 24 hours. LPS (100 ng/ml) is added to the cell culture as positive control. Supernatants from the cell cultures are then collected and analyzed for IL-12 content using commercial ELISA kit (e.g., R & D Systems (Minneapolis, Minn.)). The standard protocols provided with the kits are used.

[1079] Effect on the expression of MHC Class II, costimulatory and adhesion molecules. Three major families of cell surface antigens can be identified on monocytes: adhesion molecules, molecules involved in antigen presentation, and Fc receptor. Modulation of the expression of MHC class II antigens and other costimulatory molecules, such as B7 and ICAM-1, may result in changes in the antigen presenting capacity of monocytes and ability to induce T cell activation. Increased expression of Fc receptors may correlate with improved monocyte cytotoxic activity, cytokine release and phagocytosis.

[1080] FACS analysis is used to examine the surface antigens as follows. Monocytes are treated 1-5 days with increasing concentrations of an albumin fusion protein of the invention or LPS (positive control), washed with PBS containing 1% BSA and 0.02 mM sodium azide, and then incubated with 1:20 dilution of appropriate FITC- or PE-labeled monoclonal antibodies for 30 minutes at 4 degrees C. After an additional wash, the labeled cells are analyzed by flow cytometry on a FACScan (Becton Dickinson).

[1081] Monocyte activation and/or increased survival. Assays for molecules that activate (or alternatively, inactivate) monocytes and/or increase monocyte survival (or alternatively, decrease monocyte survival) are known in the art and may routinely be applied to determine whether a molecule of the invention functions as an inhibitor or activator of monocytes. Albumin fusion proteins of the invention can be screened using the three assays described below. For each of these assays, Peripheral blood mononuclear cells (PBMC) are purified from single donor leukopacks (American Red Cross, Baltimore, Md.) by centrifugation through a Histopaque gradient (Sigma). Monocytes are isolated from PBMC by counterflow centrifugal elutriation.

[1082] Monocyte Survival Assay. Human peripheral blood monocytes progressively lose viability when cultured in absence of serum or other stimuli. Their death results from internally regulated processes (apoptosis). Addition to the culture of activating factors, such as TNF-alpha dramatically improves cell survival and prevents DNA fragmentation. Propidium iodide (PI) staining is used to measure apoptosis as follows. Monocytes are cultured for 48 hours in polypropylene tubes in serum-free medium (positive control), in the presence of 100 ng/ml TNF-alpha (negative control), and in the presence of varying concentrations of the fusion protein to be tested. Cells are suspended at a concentration of 2×10⁶/ml in PBS containing PI at a final concentration of 5 μg/ml, and then incubated at room temperature for 5 minutes before FACScan analysis. PI uptake has been demonstrated to correlate with DNA fragmentation in this experimental paradigm.

[1083] Effect on cytokine release. An important function of monocytes/macrophages is their regulatory activity on other cellular populations of the immune system through the release of cytokines after stimulation. An ELISA to measure cytokine release is performed as follows. Human monocytes are incubated at a density of 5×10⁵ cells/ml with increasing concentrations of an albumin fusion protein of the invention and under the same conditions, but in the absence of the fusion protein. For IL-12 production, the cells are primed overnight with IFN (100 U/ml) in the presence of the fusion protein. LPS (10 ng/ml) is then added. Conditioned media are collected after 24 h and kept frozen until use. Measurement of TNF-alpha, IL-10, MCP-1 and IL-8 is then performed using a commercially available ELISA kit (e.g., R & D Systems (Minneapolis, Minn.)) and applying the standard protocols provided with the kit.

[1084] Oxidative burst. Purified monocytes are plated in 96-w plate at 2-1×10⁵ cell/well. Increasing concentrations of an albumin fusion protein of the invention are added to the wells in a total volume of 0.2 ml culture medium (RPMI 1640+10% FCS, glutamine and antibiotics). After 3 days incubation, the plates are centrifuged and the medium is removed from the wells. To the macrophage monolayers, 0.2 ml per well of phenol red solution (140 mM NaCl, 10 mM potassium phosphate buffer pH 7.0, 5.5 mM dextrose, 0.56 mM phenol red and 19 U/ml of HRPO) is added, together with the stimulant (200 nM PMA). The plates are incubated at 37° C. for 2 hours and the reaction is stopped by adding 20 μl 1N NaOH per well. The absorbance is read at 610 nm. To calculate the amount of H₂O₂ produced by the macrophages, a standard curve of a H₂O₂ solution of known molarity is performed for each experiment.

[1085] The studies described in this example tested activity of fusion proteins of the invention. However, one skilled in the art could easily modify the exemplified studies to test the activity of fusion proteins or polynucleotides of the invention (e.g., gene therapy).

### Example 23

### Biological Effects of Fusion Proteins of the Invention

[1086] Astrocyte and Neuronal Assays

[1087] Albumin fusion proteins of the invention can be tested for activity in promoting the survival, neurite outgrowth, or phenotypic differentiation of cortical neuronal cells and for inducing the proliferation of glial fibrillary acidic protein immunopositive cells, astrocytes. The selection of cortical cells for the bioassay is based on the prevalent expression of FGF-1 and FGF-2 in cortical structures and on the previously reported enhancement of cortical neuronal survival resulting from FGF-2 treatment. A thymidine incorporation assay, for example, can be used to elucidate an albumin fusion protein of the invention's activity on these cells.

[1088] Moreover, previous reports describing the biological effects of FGF-2 (basic FGF) on cortical or hippocampal neurons in vitro have demonstrated increases in both neuron survival and neurite outgrowth (Walicke et al., “Fibroblast growth factor promotes survival of dissociated hippocampal neurons and enhances neurite extension.” Proc. Natl. Acad. Sci. USA 83:3012-3016. (1986), assay herein incorporated by reference in its entirety). However, reports from experiments done on PC-12 cells suggest that these two responses are not necessarily synonymous and may depend on not only which FGF is being tested but also on which receptor(s) are expressed on the target cells. Using the primary cortical neuronal culture paradigm, the ability of an albumin fusion protein of the invention to induce neurite outgrowth can be compared to the response achieved with FGF-2 using, for example, a thymidine incorporation assay.

[1089] Fibroblast and Endothelial Cell Assays

[1090] Human lung fibroblasts are obtained from Clonetics (San Diego, Calif.) and maintained in growth media from Clonetics. Dermal microvascular endothelial cells are obtained from Cell Applications (San Diego, Calif.). For proliferation assays, the human lung fibroblasts and dermal microvascular endothelial cells can be cultured at 5,000 cells/well in a 96-well plate for one day in growth medium. The cells are then incubated for one day in 0.1% BSA basal medium. After replacing the medium with fresh 0.1% BSA medium, the cells are incubated with the test fusion protein of the invention proteins for 3 days. Alamar Blue (Alamar Biosciences, Sacramento, Calif.) is added to each well to a final concentration of 10%. The cells are incubated for 4 hr. Cell viability is measured by reading in a CytoFluor fluorescence reader. For the PGE₂ assays, the human lung fibroblasts are cultured at 5,000 cells/well in a 96-well plate for one day. After a medium change to 0.1% BSA basal medium, the cells are incubated with FGF-2 or fusion protein of the invention with or without IL-1α for 24 hours. The supernatants are collected and assayed for PGE₂ by EIA kit (Cayman, Ann Arbor, Mich.). For the IL-6 assays, the human lung fibroblasts are cultured at 5,000 cells/well in a 96-well plate for one day. After a medium change to 0.1% BSA basal medium, the cells are incubated with FGF-2 or with or without an albumin fusion protein of the invention and/or IL-1α for 24 hours. The supernatants are collected and assayed for IL-6 by ELISA kit (Endogen, Cambridge, Mass.).

[1091] Human lung fibroblasts are cultured with FGF-2 or an albumin fusion protein of the invention for 3 days in basal medium before the addition of Alamar Blue to assess effects on growth of the fibroblasts. FGF-2 should show a stimulation at 10-2500 ng/ml which can be used to compare stimulation with the fusion protein of the invention.

[1092] Cell Proliferation Based on [3H]Thymidine Incorporation

[1093] The following [3H]Thymidine incorporation assay can be used to measure the effect of a Therapeutic proteins, e.g., growth factor proteins, on the proliferation of cells such as fibroblast cells, epithelial cells or immature muscle cells.

[1094] Sub-confluent cultures are arrested in G1 phase by an 18 h incubation in serum-free medium. Therapeutic proteins are then added for 24 h and during the last 4 h, the cultures are labeled with [3H]thymidine, at a final concentration of 0.33 μM (25 Ci/mmol, Amersham, Arlington Heights, Ill.). The incorporated [3H]thymidine is precipitated with ice-cold 10% trichloroacetic acid for 24 h. Subsequently, the cells are rinsed sequentially with ice-cold 10% trichloroacetic acid and then with ice-cold water. Following lysis in 0.5 M NaOH, the lysates and PBS rinses (500 ml) are pooled, and the amount of radioactivity is measured.

[1095] Parkinson Models.

[1096] The loss of motor function in Parkinson's disease is attributed to a deficiency of striatal dopamine resulting from the degeneration of the nigrostriatal dopaminergic projection neurons. An animal model for Parkinson's that has been extensively characterized involves the systemic administration of 1-methyl-4 phenyl 1,2,3,6-tetrahydropyridine (MPTP). In the CNS, MPTP is taken-up by astrocytes and catabolized by monoamine oxidase B to 1-methyl-4-phenyl pyridine (MPP⁺) and released. Subsequently, MPP⁺ is actively accumulated in dopaminergic neurons by the high-affinity reuptake transporter for dopamine. MPP⁺ is then concentrated in mitochondria by the electrochemical gradient and selectively inhibits nicotidamide adenine disphosphate: ubiquinone oxidoreductionase (complex I), thereby interfering with electron transport and eventually generating oxygen radicals.

[1097] It has been demonstrated in tissue culture paradigms that FGF-2 (basic FGF) has trophic activity towards nigral dopaminergic neurons (Ferrari et al., Dev. Biol. 1989). Recently, Dr. Unsicker's group has demonstrated that administering FGF-2 in gel foam implants in the striatum results in the near complete protection of nigral dopaminergic neurons from the toxicity associated with MPTP exposure (Otto and Unsicker, J. Neuroscience, 1990).

[1098] Based on the data with FGF-2, an albumin fusion protein of the invention can be evaluated to determine whether it has an action similar to that of FGF-2 in enhancing dopaminergic neuronal survival in vitro and it can also be tested in vivo for protection of dopaminergic neurons in the striatum from the damage associated with MPTP treatment. The potential effect of an albumin fusion protein of the invention is first examined in vitro in a dopaminergic neuronal cell culture paradigm. The cultures are prepared by dissecting the midbrain floor plate from gestation day 14 Wistar rat embryos. The tissue is dissociated with trypsin and seeded at a density of 200,000 cells/cm² on polyorthinine-laminin coated glass coverslips. The cells are maintained in Dulbecco's Modified Eagle's medium and F12 medium containing hormonal supplements (N1). The cultures are fixed with paraformaldehyde after 8 days in vitro and are processed for tyrosine hydroxylase, a specific marker for dopaminergic neurons, immunohistochemical staining. Dissociated cell cultures are prepared from embryonic rats. The culture medium is changed every third day and the factors are also added at that time.

[1099] Since the dopaminergic neurons are isolated from animals at gestation day 14, a developmental time which is past the stage when the dopaminergic precursor cells are proliferating, an increase in the number of tyrosine hydroxylase immunopositive neurons would represent an increase in the number of dopaminergic neurons surviving in vitro. Therefore, if a therapeutic protein of the invention acts to prolong the survival of dopaminergic neurons, it would suggest that the fusion protein may be involved in Parkinson's Disease.

[1100] The studies described in this example tested activity of albumin fusion proteins of the invention. However, one skilled in the art could easily modify the exemplified studies to test the activity of fusion proteins and polynucleotides of the invention (e.g., gene therapy).

### Example 24

### The Effect of Albumin Fusion Proteins of the Invention on the Growth of Vascular Endothelial Cells

[1101] On day 1, human umbilical vein endothelial cells (HUVEC) are seeded at 2-5×10⁴ cells/35 mm dish density in M199 medium containing 4% fetal bovine serum (FBS), 16 units/ml heparin, and 50 units/ml endothelial cell growth supplements (ECGS, Biotechnique, Inc.). On day 2, the medium is replaced with M199 containing 10% FBS, 8 units/ml heparin. An albumin fusion protein of the invention, and positive controls, such as VEGF and basic FGF (bFGF) are added, at varying concentrations. On days 4 and 6, the medium is replaced. On day 8, cell number is determined with a Coulter Counter.

[1102] An increase in the number of HUVEC cells indicates that the fusion protein may proliferate vascular endothelial cells, while a decrease in the number of HUVEC cells indicates that the fusion protein inhibits vascular endothelial cells.

[1103] The studies described in this example tested activity of an albumin fusion protein of the invention. However, one skilled in the art could easily modify the exemplified studies to test the activity of a fusion protiem and polynucleotides of the invention.

### Example 25

### Rat Corneal Wound Healing Model

[1104] This animal model shows the effect of an albumin fusion protein of the invention on neovascularization. The experimental protocol includes: Making a 1-1.5 mm long incision from the center of cornea into the stromal layer. Inserting a spatula below the lip of the incision facing the outer corner of the eye. Making a pocket (its base is 1-1.5 mm form the edge of the eye). Positioning a pellet, containing 50 ng-5 ug of an albumin fusion protein of the invention, within the pocket.

[1105] Treatment with an an albumin fusion protein of the invention can also be applied topically to the corneal wounds in a dosage range of 20 mg-500 mg (daily treatment for five days).

[1106] The studies described in this example test the activity of an albumin fusion protein of the invention. However, one skilled in the art could easily modify the exemplified studies to test the activity of fusion proteins and polynucleotides of the invention (e.g., gene therapy).

### Example 26

### Diabetic Mouse and Glucocorticoid-Impaired Wound Healing Models

[1107] Diabetic db+/db+ Mouse Model.

[1108] To demonstrate that an albumin fusion protein of the invention accelerates the healing process, the genetically diabetic mouse model of wound healing is used. The full thickness wound healing model in the db+/db+ mouse is a well characterized, clinically relevant and reproducible model of impaired wound healing. Healing of the diabetic wound is dependent on formation of granulation tissue and re-epithelialization rather than contraction (Gartner, M. H. et al., J. Surg. Res. 52:389 (1992); Greenhalgh, D. G. et al., Am. J. Pathol. 136:1235 (1990)).

[1109] The diabetic animals have many of the characteristic features observed in Type II diabetes mellitus. Homozygous (db+/db+) mice are obese in comparison to their normal heterozygous (db+/+m) littermates. Mutant diabetic (db+/db+) mice have a single autosomal recessive mutation on chromosome 4 (db+) (Coleman et al. Proc. Natl. Acad. Sci. USA 77:283-293 (1982)). Animals show polyphagia, polydipsia and polyuria. Mutant diabetic mice (db+/db+) have elevated blood glucose, increased or normal insulin levels, and suppressed cell-mediated immunity (Mandel et al., J. Immunol. 120:1375 (1978); Debray-Sachs, M. et al., Clin. Exp. Immunol. 51(1):1-7 (1983); Leiter et al., Am. J. of Pathol. 114:46-55 (1985)). Peripheral neuropathy, myocardial complications, and microvascular lesions, basement membrane thickening and glomerular filtration abnormalities have been described in these animals (Norido, F. et al., Exp. Neurol. 83(2):221-232 (1984); Robertson et al., Diabetes 29(1):60-67 (1980); Giacomelli et al., Lab Invest. 40(4):460-473 (1979); Coleman, D. L., Diabetes 31 (Suppl):1-6 (1982)). These homozygous diabetic mice develop hyperglycemia that is resistant to insulin analogous to human type II diabetes (Mandel et al., J. Immunol. 120:1375-1377 (1978)).

[1110] The characteristics observed in these animals suggests that healing in this model may be similar to the healing observed in human diabetes (Greenhalgh, et al., Am. J. of Pathol. 136:1235-1246 (1990)).

[1111] Genetically diabetic female C57BL/KsJ (db+/db+) mice and their non-diabetic (db+/+m) heterozygous littermates are used in this study (Jackson Laboratories). The animals are purchased at 6 weeks of age and are 8 weeks old at the beginning of the study. Animals are individually housed and received food and water ad libitum. All manipulations are performed using aseptic techniques. The experiments are conducted according to the rules and guidelines of Human Genome Sciences, Inc. Institutional Animal Care and Use Committee and the Guidelines for the Care and Use of Laboratory Animals.

[1112] Wounding protocol is performed according to previously reported methods (Tsuboi, R. and Rifkin, D. B., J. Exp. Med. 172:245-251 (1990)). Briefly, on the day of wounding, animals are anesthetized with an intraperitoneal injection of Avertin (0.01 mg/mL), 2,2,2-tribromoethanol and 2-methyl-2-butanol dissolved in deionized water. The dorsal region of the animal is shaved and the skin washed with 70% ethanol solution and iodine. The surgical area is dried with sterile gauze prior to wounding. An 8 mm full-thickness wound is then created using a Keyes tissue punch. Immediately following wounding, the surrounding skin is gently stretched to eliminate wound expansion. The wounds are left open for the duration of the experiment. Application of the treatment is given topically for 5 consecutive days commencing on the day of wounding. Prior to treatment, wounds are gently cleansed with sterile saline and gauze sponges.

[1113] Wounds are visually examined and photographed at a fixed distance at the day of surgery and at two day intervals thereafter. Wound closure is determined by daily measurement on days 1-5 and on day 8. Wounds are measured horizontally and vertically using a calibrated Jameson caliper. Wounds are considered healed if granulation tissue is no longer visible and the wound is covered by a continuous epithelium.

[1114] An albumin fusion protein of the invention is administered using at a range different doses, from 4 mg to 500 mg per wound per day for 8 days in vehicle. Vehicle control groups received 50 mL of vehicle solution.

[1115] Animals are euthanized on day 8 with an intraperitoneal injection of sodium pentobarbital (300 mg/kg). The wounds and surrounding skin are then harvested for histology and immunohistochemistry. Tissue specimens are placed in 10% neutral buffered formalin in tissue cassettes between biopsy sponges for further processing.

[1116] Three groups of 10 animals each (5 diabetic and 5 non-diabetic controls) are evaluated: 1) Vehicle placebo control, 2) untreated group, and 3) treated group.

[1117] Wound closure is analyzed by measuring the area in the vertical and horizontal axis and obtaining the total square area of the wound. Contraction is then estimated by establishing the differences between the initial wound area (day 0) and that of post treatment (day 8). The wound area on day 1 is 64 mm², the corresponding size of the dermal punch. Calculations are made using the following formula:

[Open area on day 8]−[Open area on day 1]/[Open area on day 1]

[1118] Specimens are fixed in 10% buffered formalin and paraffin embedded blocks are sectioned perpendicular to the wound surface (5 mm) and cut using a Reichert-Jung microtome. Routine hematoxylin-eosin (H&E) staining is performed on cross-sections of bisected wounds. Histologic examination of the wounds are used to assess whether the healing process and the morphologic appearance of the repaired skin is altered by treatment with an albumin fusion protein of the invention. This assessment included verification of the presence of cell accumulation, inflammatory cells, capillaries, fibroblasts, re-epithelialization and epidermal maturity (Greenhalgh, D. G. et al., Am. J. Pathol. 136:1235 (1990)). A calibrated lens micrometer is used by a blinded observer.

[1119] Tissue sections are also stained immunohistochemically with a polyclonal rabbit anti-human keratin antibody using ABC Elite detection system. Human skin is used as a positive tissue control while non-immune IgG is used as a negative control. Keratinocyte growth is determined by evaluating the extent of reepithelialization of the wound using a calibrated lens micrometer.

[1120] Proliferating cell nuclear antigen/cyclin (PCNA) in skin specimens is demonstrated by using anti-PCNA antibody (1:50) with an ABC Elite detection system. Human colon cancer served as a positive tissue control and human brain tissue is used as a negative tissue control. Each specimen included a section with omission of the primary antibody and substitution with non-immune mouse IgG. Ranking of these sections is based on the extent of proliferation on a scale of 0-8, the lower side of the scale reflecting slight proliferation to the higher side reflecting intense proliferation.

[1121] Experimental data are analyzed using an unpaired t test. A p value of <0.05 is considered significant.

[1122] Steroid Impaired Rat Model

[1123] The inhibition of wound healing by steroids has been well documented in various in vitro and in vivo systems (Wahl, Glucocorticoids and Wound healing. In: Anti-Inflammatory Steroid Action Basic and Clinical Aspects. 280-302 (1989); Wahlet al., J. Immunol. 115: 476-481 (1975); Werb et al., J. Exp. Med. 147:1684-1694 (1978)). Glucocorticoids retard wound healing by inhibiting angiogenesis, decreasing vascular permeability (Ebert et al., An. Intern. Med. 37:701-705 (1952)), fibroblast proliferation, and collagen synthesis (Beck et al., Growth Factors. 5: 295-304 (1991); Haynes et al., J. Clin. Invest. 61: 703-797 (1978)) and producing a transient reduction of circulating monocytes (Haynes et al., J. Clin. Invest. 61: 703-797 (1978); Wahl, “Glucocorticoids and wound healing”, In: Antiinflammatory Steroid Action: Basic and Clinical Aspects, Academic Press, New York, pp. 280-302 (1989)). The systemic administration of steroids to impaired wound healing is a well establish phenomenon in rats (Beck et al., Growth Factors. 5: 295-304 (1991); Haynes et al., J. Clin. Invest. 61: 703-797 (1978); Wahl, “Glucocorticoids and wound healing”, In: Antiinflammatory Steroid Action: Basic and Clinical Aspects, Academic Press, New York, pp. 280-302 (1989); Pierce et al., Proc. Natl. Acad. Sci. USA 86: 2229-2233 (1989)).

[1124] To demonstrate that an albumin fusion protein of the invention can accelerate the healing process, the effects of multiple topical applications of the fusion protein on full thickness excisional skin wounds in rats in which healing has been impaired by the systemic administration of methylprednisolone is assessed.

[1125] Young adult male Sprague Dawley rats weighing 250-300 g (Charles River Laboratories) are used in this example. The animals are purchased at 8 weeks of age and are 9 weeks old at the beginning of the study. The healing response of rats is impaired by the systemic administration of methylprednisolone (17 mg/kg/rat intramuscularly) at the time of wounding. Animals are individually housed and received food and water ad libitum. All manipulations are performed using aseptic techniques. This study is conducted according to the rules and guidelines of Human Genome Sciences, Inc. Institutional Animal Care and Use Committee and the Guidelines for the Care and Use of Laboratory Animals.

[1126] The wounding protocol is followed according to that described above. On the day of wounding, animals are anesthetized with an intramuscular injection of ketamine (50 mg/kg) and xylazine (5 mg/kg). The dorsal region of the animal is shaved and the skin washed with 70% ethanol and iodine solutions. The surgical area is dried with sterile gauze prior to wounding. An 8 mm full-thickness wound is created using a Keyes tissue punch. The wounds are left open for the duration of the experiment. Applications of the testing materials are given topically once a day for 7 consecutive days commencing on the day of wounding and subsequent to methylprednisolone administration. Prior to treatment, wounds are gently cleansed with sterile saline and gauze sponges.

[1127] Wounds are visually examined and photographed at a fixed distance at the day of wounding and at the end of treatment. Wound closure is determined by daily measurement on days 1-5 and on day 8. Wounds are measured horizontally and vertically using a calibrated Jameson caliper. Wounds are considered healed if granulation tissue is no longer visible and the wound is covered by a continuous epithelium.

[1128] The fusion protein of the invention is administered using at a range different doses, from 4 mg to 500 mg per wound per day for 8 days in vehicle. Vehicle control groups received 50 mL of vehicle solution.

[1129] Animals are euthanized on day 8 with an intraperitoneal injection of sodium pentobarbital (300 mg/kg). The wounds and surrounding skin are then harvested for histology. Tissue specimens are placed in 10% neutral buffered formalin in tissue cassettes between biopsy sponges for further processing.

[1130] Three groups of 10 animals each (5 with methylprednisolone and 5 without glucocorticoid) are evaluated: 1) Untreated group 2) Vehicle placebo control 3) treated groups.

[1131] Wound closure is analyzed by measuring the area in the vertical and horizontal axis and obtaining the total area of the wound. Closure is then estimated by establishing the differences between the initial wound area (day 0) and that of post treatment (day 8). The wound area on day 1 is 64 mm², the corresponding size of the dermal punch. Calculations are made using the following formula:

[Open area on day 8]−[Open area on day 1]/[Open area on day 1]

[1132] Specimens are fixed in 10% buffered formalin and paraffin embedded blocks are sectioned perpendicular to the wound surface (5 mm) and cut using an Olympus microtome. Routine hematoxylin-eosin (H&E) staining is performed on cross-sections of bisected wounds. Histologic examination of the wounds allows assessment of whether the healing process and the morphologic appearance of the repaired skin is improved by treatment with an albumin fusion protein of the invention. A calibrated lens micrometer is used by a blinded observer to determine the distance of the wound gap.

[1133] Experimental data are analyzed using an unpaired t test. A p value of <0.05 is considered significant.

[1134] The studies described in this example tested activity of an albumin fusion protein of the invention. However, one skilled in the art could easily modify the exemplified studies to test the activity of fusion proteins and polynucleotides of the invention (e.g., gene therapy).

### Example 27

### Lymphedema Animal Model

[1135] The purpose of this experimental approach is to create an appropriate and consistent lymphedema model for testing the therapeutic effects of an albumin fusion protein of the invention in lymphangiogenesis and re-establishment of the lymphatic circulatory system in the rat hind limb. Effectiveness is measured by swelling volume of the affected limb, quantification of the amount of lymphatic vasculature, total blood plasma protein, and histopathology. Acute lymphedema is observed for 7-10 days. Perhaps more importantly, the chronic progress of the edema is followed for up to 3-4 weeks.

[1136] Prior to beginning surgery, blood sample is drawn for protein concentration analysis. Male rats weighing approximately ˜350 g are dosed with Pentobarbital. Subsequently, the right legs are shaved from knee to hip. The shaved area is swabbed with gauze soaked in 70% EtOH. Blood is drawn for serum total protein testing. Circumference and volumetric measurements are made prior to injecting dye into paws after marking 2 measurement levels (0.5 cm above heel, at mid-pt of dorsal paw). The intradermal dorsum of both right and left paws are injected with 0.05 ml of 1% Evan's Blue. Circumference and volumetric measurements are then made following injection of dye into paws.

[1137] Using the knee joint as a landmark, a mid-leg inguinal incision is made circumferentially allowing the femoral vessels to be located. Forceps and hemostats are used to dissect and separate the skin flaps. After locating the femoral vessels, the lymphatic vessel that runs along side and underneath the vessel(s) is located. The main lymphatic vessels in this area are then electrically coagulated or suture ligated.

[1138] Using a microscope, muscles in back of the leg (near the semitendinosis and adductors) are bluntly dissected. The popliteal lymph node is then located. The 2 proximal and 2 distal lymphatic vessels and distal blood supply of the popliteal node are then ligated by suturing. The popliteal lymph node, and any accompanying adipose tissue, is then removed by cutting connective tissues.

[1139] Care is taken to control any mild bleeding resulting from this procedure. After lymphatics are occluded, the skin flaps are sealed by using liquid skin (Vetbond) (AJ Buck). The separated skin edges are sealed to the underlying muscle tissue while leaving a gap of ˜0.5 cm around the leg. Skin also may be anchored by suturing to underlying muscle when necessary.

[1140] To avoid infection, animals are housed individually with mesh (no bedding). Recovering animals are checked daily through the optimal edematous peak, which typically occurred by day 5-7. The plateau edematous peak are then observed. To evaluate the intensity of the lymphedema, the circumference and volumes of 2 designated places on each paw before operation and daily for 7 days are measured. The effect of plasma proteins on lymphedema is determined and whether protein analysis is a useful testing perimeter is also investigated. The weights of both control and edematous limbs are evaluated at 2 places. Analysis is performed in a blind manner.

[1141] Circumference Measurements: Under brief gas anesthetic to prevent limb movement, a cloth tape is used to measure limb circumference. Measurements are done at the ankle bone and dorsal paw by 2 different people and those 2 readings are averaged. Readings are taken from both control and edematous limbs.

[1142] Volumetric Measurements: On the day of surgery, animals are anesthetized with Pentobarbital and are tested prior to surgery. For daily volumetrics animals are under brief halothane anesthetic (rapid immobilization and quick recovery), and both legs are shaved and equally marked using waterproof marker on legs. Legs are first dipped in water, then dipped into instrument to each marked level then measured by Buxco edema software (Chen/Victor). Data is recorded by one person, while the other is dipping the limb to marked area.

[1143] Blood-plasma protein measurements: Blood is drawn, spun, and serum separated prior to surgery and then at conclusion for total protein and Ca2⁺ comparison.

[1144] Limb Weight Comparison: After drawing blood, the animal is prepared for tissue collection. The limbs are amputated using a quillitine, then both experimental and control legs are cut at the ligature and weighed. A second weighing is done as the tibio-cacaneal joint is disarticulated and the foot is weighed.

[1145] Histological Preparations: The transverse muscle located behind the knee (popliteal) area is dissected and arranged in a metal mold, filled with freezeGel, dipped into cold methylbutane, placed into labeled sample bags at −80EC until sectioning. Upon sectioning, the muscle is observed under fluorescent microscopy for lymphatics.

[1146] The studies described in this example tested activity of fusion proteins of the invention. However, one skilled in the art could easily modify the exemplified studies to test the activity of fusion protein and polynucleotides of the invention (e.g., gene therapy).

### Example 28

### Suppression of TNF Alpha-Induced Adhesion Molecule Expression by an Albumin Fusion Protein of the Invention

[1147] The recruitment of lymphocytes to areas of inflammation and angiogenesis involves specific receptor-ligand interactions between cell surface adhesion molecules (CAMs) on lymphocytes and the vascular endothelium. The adhesion process, in both normal and pathological settings, follows a multi-step cascade that involves intercellular adhesion molecule-1 (ICAM-1), vascular cell adhesion molecule-1 (VCAM-1), and endothelial leukocyte adhesion molecule-1 (E-selectin) expression on endothelial cells (EC). The expression of these molecules and others on the vascular endothelium determines the efficiency with which leukocytes may adhere to the local vasculature and extravasate into the local tissue during the development of an inflammatory response. The local concentration of cytokines and growth factor participate in the modulation of the expression of these CAMs.

[1148] Tumor necrosis factor alpha (TNF-a), a potent proinflammatory cytokine, is a stimulator of all three CAMs on endothelial cells and may be involved in a wide variety of inflammatory responses, often resulting in a pathological outcome.

[1149] The potential of an albumin fusion protein of the invention to mediate a suppression of TNF-a induced CAM expression can be examined. A modified ELISA assay which uses ECs as a solid phase absorbent is employed to measure the amount of CAM expression on TNF-a treated ECs when co-stimulated with a member of the FGF family of proteins.

[1150] To perform the experiment, human umbilical vein endothelial cell (HUVEC) cultures are obtained from pooled cord harvests and maintained in growth medium (EGM-2; Clonetics, San Diego, Calif.) supplemented with 10% FCS and 1% penicillin/streptomycin in a 37 degree C. humidified incubator containing 5% CO₂. HUVECs are seeded in 96-well plates at concentrations of 1×10⁴ cells/well in EGM medium at 37 degree C. for 18-24 hrs or until confluent. The monolayers are subsequently washed 3 times with a serum-free solution of RPMI-1640 supplemented with 100 U/ml penicillin and 100 mg/ml streptomycin, and treated with a given cytokine and/or growth factor(s) for 24 h at 37 degree C. Following incubation, the cells are then evaluated for CAM expression.

[1151] Human Umbilical Vein Endothelial cells (HUVECs) are grown in a standard 96 well plate to confluence. Growth medium is removed from the cells and replaced with 90 ul of 199 Medium (10% FBS). Samples for testing and positive or negative controls are added to the plate in triplicate (in 10 ul volumes). Plates are incubated at 37 degree C. for either 5 h (selectin and integrin expression) or 24 h (integrin expression only). Plates are aspirated to remove medium and 100 μl of 0.1% paraformaldehyde-PBS (with Ca++ and Mg++) is added to each well. Plates are held at 4° C. for 30 min.

[1152] Fixative is then removed from the wells and wells are washed 1× with PBS(+Ca,Mg)+0.5% BSA and drained. Do not allow the wells to dry. Add 10 μl of diluted primary antibody to the test and control wells. Anti-ICAM-1-Biotin, Anti-VCAM-1-Biotin and Anti-E-selectin-Biotin are used at a concentration of 10 μg/ml (1:10 dilution of 0.1 mg/ml stock antibody). Cells are incubated at 37° C. for 30 min. in a humidified environment. Wells are washed ×3 with PBS(+Ca,Mg)+0.5% BSA.

[1153] Then add 20 μl of diluted ExtrAvidin-Alkaline Phosphotase (1:5,000 dilution) to each well and incubated at 37° C. for 30 min. Wells are washed ×3 with PES(+Ca,Mg)+0.5% BSA. 1 tablet of p-Nitrophenol Phosphate pNPP is dissolved in 5 ml of glycine buffer (pH 10.4). 100 μl of pNPP substrate in glycine buffer is added to each test well. Standard wells in triplicate are prepared from the working dilution of the ExtrAvidin-Alkaline Phosphotase in glycine buffer: 1:5,000 (10⁰)>10^{-0.5}>10⁻¹>10^{-1.5}0.5 μl of each dilution is added to triplicate wells and the resulting AP content in each well is 5.50 ng, 1.74 ng, 0.55 ng, 0.18 ng. 100 μl of pNNP reagent must then be added to each of the standard wells. The plate must be incubated at 37° C. for 4 h. A volume of 50 μl of 3M NaOH is added to all wells. The results are quantified on a plate reader at 405 nm. The background subtraction option is used on blank wells filled with glycine buffer only. The template is set up to indicate the concentration of AP-conjugate in each standard well [5.50 ng; 1.74 ng; 0.55 ng; 0.18 ng]. Results are indicated as amount of bound AP-conjugate in each sample.

[1154] The studies described in this example tested activity of fusion proteins of the invention. However, one skilled in the art could easily modify the exemplified studies to test the activity of fusion proteins and polynucleotides of the invention (e.g., gene therapy).

### Example 29

### Construction of GAS Reporter Construct

[1155] One signal transduction pathway involved in the differentiation and proliferation of cells is called the Jaks-STATs pathway. Activated proteins in the Jaks-STATs pathway bind to gamma activation site “GAS” elements or interferon-sensitive responsive element (“ISRE”), located in the promoter of many genes. The binding of a protein to these elements alter the expression of the associated gene.

[1156] GAS and ISRE elements are recognized by a class of transcription factors called Signal Transducers and Activators of Transcription, or “STATs.” There are six members of the STATs family. Stat1 and Stat3 are present in many cell types, as is Stat2 (as response to IFN-alpha is widespread). Stat4 is more restricted and is not in many cell types though it has been found in T helper class I, cells after treatment with IL-12. Stat5 was originally called mammary growth factor, but has been found at higher concentrations in other cells including myeloid cells. It can be activated in tissue culture cells by many cytokines.

[1157] The STATs are activated to translocate from the cytoplasm to the nucleus upon tyrosine phosphorylation by a set of kinases known as the Janus Kinase (“Jaks”) family. Jaks represent a distinct family of soluble tyrosine kinases and include Tyk2, Jak1, Jak2, and Jak3. These kinases display significant sequence similarity and are generally catalytically inactive in resting cells.

[1158] The Jaks are activated by a wide range of receptors summarized in the Table below. (Adapted from review by Schidler and Darnell, Ann. Rev. Biochem. 64:621-51 (1995)). A cytokine receptor family, capable of activating Jaks, is divided into two groups: (a) Class 1 includes receptors for IL-2, IL-3, IL-4, IL-6, IL-7, IL-9, IL-11, IL-12, IL-15, Epo, PRL, GH, G-CSF, GM-CSF, LIF, CNTF, and thrombopoietin; and (b) Class 2 includes IFN-a, IFN-g, and IL-10. The Class 1 receptors share a conserved cysteine motif (a set of four conserved cysteines and one tryptophan) and a WSXWS motif (a membrane proximal region encoding Trp-Ser-Xaa-Trp-Ser (SEQ ID NO: 37)).

[1159] Thus, on binding of a ligand to a receptor, Jaks are activated, which in turn activate STATs, which then translocate and bind to GAS elements. This entire process is encompassed in the Jaks-STATs signal transduction pathway. Therefore, activation of the Jaks-STATs pathway, reflected by the binding of the GAS or the ISRE element, can be used to indicate proteins involved in the proliferation and differentiation of cells. For example, growth factors and cytokines are known to activate the Jaks-STATs pathway (See Table below). Thus, by using GAS elements linked to reporter molecules, activators of the Jaks-STATs pathway can be identified.

| | JAKs | | | | | |
|---|---|---|---|---|---|---|
| Ligand | tyk2 | Jak1 | Jak2 | Jak3 | STATS | GAS (elements) or ISRE |
| IFN family | | | | | | |
| IFN-a/B | + | + | − | − | 1, 2, 3 | ISRE |
| IFN-g | + | + | − | | 1 | GAS (IRF1 > Lys6 > IFP) |
| Il-10 | + | ? | ? | − | 1, 3 | |
| gp130 family | | | | | | |
| IL-6 (Pleiotropic) | + | + | + | ? | 1, 3 | GAS (IRF1 > Lys6 > IFP) |
| Il-11 (Pleiotropic) | ? | + | ? | ? | 1, 3 | |
| OnM (Pleiotropic) | ? | + | + | ? | 1, 3 | |
| LIF (Pleiotropic) | ? | + | + | ? | 1, 3 | |
| CNTF (Pleiotropic) | −/+ | + | + | ? | 1, 3 | |
| G-CSF (Pleiotropic) | ? | + | ? | ? | 1, 3 | |
| IL-12 (Pleiotropic) | + | − | + | + | 1, 3 | |
| g-C family | | | | | | |
| IL-2 (lymphocytes) | − | + | − | + | 1, 3, 5 | GAS |
| IL-4 (lymph/myeloid) | − | + | − | + | 6 | GAS (IRF1 = IFP >> Ly6)(IgH) |
| IL-7 (lymphocytes) | − | + | − | + | 5 | GAS |
| IL-9 (lymphocytes) | − | + | − | + | 5 | GAS |
| IL-13 (lymphocyte) | − | + | ? | ? | 6 | GAS |
| IL-15 | ? | + | ? | + | 5 | GAS |
| gp140 family | | | | | | |
| IL-3 (myeloid) | − | − | + | − | 5 | GAS (IRF1 > IFP >> Ly6) |
| IL-5 (myeloid) | − | − | + | − | 5 | GAS |
| GM-CSF (myeloid) | − | − | + | − | 5 | GAS |
| Growth hormone family | | | | | | |
| GH | ? | − | + | − | 5 | |
| PRL | ? | +/− | + | − | 1, 3, 5 | |
| EPO | ? | − | + | − | 5 | GAS (B-CAS > IRF1 = IFP >> Ly6) |
| Receptor Tyrosine Kinases | | | | | | |
| EGF | ? | + | + | − | 1, 3 | GAS (IRF1) |
| PDGF | ? | + | + | − | 1, 3 | |
| CSF-1 | ? | + | + | − | 1, 3 | GAS (not IRF1) |

[1160] To construct a synthetic GAS containing promoter element, which is used in the Biological Assays described in Examples 32-33, a PCR based strategy is employed to generate a GAS-SV40 promoter sequence. The 5′ primer contains four tandem copies of the GAS binding site found in the IRF1 promoter and previously demonstrated to bind STATS upon induction with a range of cytokines (Rothman et al., Immunity 1:457-468 (1994)), although other GAS or ISRE elements can be used instead. The 5′ primer also contains 18 bp of sequence complementary to the SV40 early promoter sequence and is flanked with an XhoI site. The sequence of the 5′ primer is:

(SEQ ID NO: 38)

5′:GCGCCTCGAGATTTCCCCGAAATCTAGATTTCCCCGAAATGATTTC
CCCGAAATGATTTCCCCGAAATATCTGCCATCTCAATTAG:3′

[1161] The downstream primer is complementary to the SV40 promoter and is flanked with a Hind DI site: 5′:GCGGCAAGCTTTTTCAAAGCCTAGGC:3′ (SEQ ID NO: 39)

[1162] PCR amplification is performed using the SV40 promoter template present in the B-gal:promoter plasmid obtained from Clontech. The resulting PCR fragment is digested with XhoI/Hind III and subcloned into BLSK2-. (Stratagene.) Sequencing with forward and reverse primers confirms that the insert contains the following sequence:

(SEQ ID NO: 40)
5′:CTCGAGATTTCCCCGAAATCTAGATTTCCCCGAAATGATTTCCCCGAAATGATTTC
CCCGAAATATCTGCCATCTCAATTAGTCAGCAACCATAGTCCCGCCCCTAACT
CCGCCCATCCCGCCCCTAACTCCGCCCAGTTCCGCCCATTCTCCGCCCCATGGCT
GACTAATTTTTTTTATTTATGCAGAGGCCGAGGCCGCCTCGGCCTCTGAGCTATTCCAGA
AGTAGTGAGGAGGCTTTTTTGGAGGCCTAGGCTTTTGCAAAAAGCTT:3′

[1163] With this GAS promoter element linked to the SV40 promoter, a GAS:SEAP2 reporter construct is next engineered. Here, the reporter molecule is a secreted alkaline phosphatase, or “SEAP.” Clearly, however, any reporter molecule can be instead of SEAP, in this or in any of the other Examples. Well known reporter molecules that can be used instead of SEAP include chloramphenicol acetyltransferase (CAT), luciferase, alkaline phosphatase, B-galactosidase, green fluorescent protein (GFP), or any protein detectable by an antibody.

[1164] The above sequence confirmed synthetic GAS-SV40 promoter element is subcloned into the pSEAP-Promoter vector obtained from Clontech using HindIII and XhoI, effectively replacing the SV40 promoter with the amplified GAS:SV40 promoter element, to create the GAS-SEAP vector. However, this vector does not contain a neomycin resistance gene, and therefore, is not preferred for mammalian expression systems.

[1165] Thus, in order to generate mammalian stable cell lines expressing the GAS-SEAP reporter, the GAS-SEAP cassette is removed from the GAS-SEAP vector using SalI and NotI, and inserted into a backbone vector containing the neomycin resistance gene, such as pGFP-1 (Clontech), using these restriction sites in the multiple cloning site, to create the GAS-SEAP/Neo vector. Once this vector is transfected into mammalian cells, this vector can then be used as a reporter molecule for GAS binding as described in Examples 32-33.

[1166] Other constructs can be made using the above description and replacing GAS with a different promoter sequence. For example, construction of reporter molecules containing EGR and NF-KB promoter sequences are described in Examples 34 and 35. However, many other promoters can be substituted using the protocols described in these Examples. For instance, SRE, IL-2, NFAT, or Osteocalcin promoters can be substituted, alone or in combination (e.g., GAS/NF-KB/EGR, GAS/NF-KB, Il-2/NFAT, or NF-KB/GAS). Similarly, other cell lines can be used to test reporter construct activity, such as HELA (epithelial), HUVEC (endothelial), Reh (B-cell), Saos-2 (osteoblast), HUVAC (aortic), or Cardiomyocyte.

### Example 30

### Assay for SEAP Activity

[1167] As a reporter molecule for the assays described in examples disclosed herein, SEAP activity is assayed using the Tropix Phospho-light Kit (Cat. BP-400) according to the following general procedure. The Tropix Phospho-light Kit supplies the Dilution, Assay, and Reaction Buffers used below.

[1168] Prime a dispenser with the 2.5× Dilution Buffer and dispense 15 ul of 2.5× dilution buffer into Optiplates containing 35 ul of a solution containing an albumin fusion protein of the invention. Seal the plates with a plastic sealer and incubate at 65 degree C. for 30 min. Separate the Optiplates to avoid uneven heating.

[1169] Cool the samples to room temperature for 15 minutes. Empty the dispenser and prime with the Assay Buffer. Add 50 ml Assay Buffer and incubate at room temperature 5 min. Empty the dispenser and prime with the Reaction Buffer (see the Table below). Add 50 ul Reaction Buffer and incubate at room temperature for 20 minutes. Since the intensity of the chemiluminescent signal is time dependent, and it takes about 10 minutes to read 5 plates on a luminometer, thus one should treat 5 plates at each time and start the second set 10 minutes later.

[1170] Read the relative light unit in the luminometer. Set H12 as blank, and print the results. An increase in chemiluminescence indicates reporter activity.

Reaction Buffer Formulation:

| # of | Rxn buffer | CSPD |
|---|---|---|
| plates | diluent (ml) | (ml) |
| 10 | 60 | 3 |
| 11 | 65 | 3.25 |
| 12 | 70 | 3.5 |
| 13 | 75 | 3.75 |
| 14 | 80 | 4 |
| 15 | 85 | 4.25 |
| 16 | 90 | 4.5 |
| 17 | 95 | 4.75 |
| 18 | 100 | 5 |
| 19 | 105 | 5.25 |
| 20 | 110 | 5.5 |
| 21 | 115 | 5.75 |
| 22 | 120 | 6 |
| 23 | 125 | 6.25 |
| 24 | 130 | 6.5 |
| 25 | 135 | 6.75 |
| 26 | 140 | 7 |
| 27 | 145 | 7.25 |
| 28 | 150 | 7.5 |
| 29 | 155 | 7.75 |
| 30 | 160 | 8 |
| 31 | 165 | 8.25 |
| 32 | 170 | 8.5 |
| 33 | 175 | 8.75 |
| 34 | 180 | 9 |
| 35 | 185 | 9.25 |
| 36 | 190 | 9.5 |
| 37 | 195 | 9.75 |
| 38 | 200 | 10 |
| 39 | 205 | 10.25 |
| 40 | 210 | 10.5 |
| 41 | 215 | 10.75 |
| 42 | 220 | 11 |
| 43 | 225 | 11.25 |
| 44 | 230 | 11.5 |
| 45 | 235 | 11.75 |
| 46 | 240 | 12 |
| 47 | 245 | 12.25 |
| 48 | 250 | 12.5 |
| 49 | 255 | 12.75 |
| 50 | 260 | 13 |

### Example 31

### Assay Identifying Neuronal Activity

[1171] When cells undergo differentiation and proliferation, a group of genes are activated through many different signal transduction pathways. One of these genes, EGR1 (early growth response gene 1), is induced in various tissues and cell types upon activation. The promoter of EGR1 is responsible for such induction. Using the EGR1 promoter linked to reporter molecules, the ability of fusion proteins of the invention to activate cells can be assessed.

[1172] Particularly, the following protocol is used to assess neuronal activity in PC12 cell lines. PC12 cells (rat phenochromocytoma cells) are known to proliferate and/or differentiate by activation with a number of mitogens, such as TPA (tetradecanoyl phorbol acetate), NGF (nerve growth factor), and EGF (epidermal growth factor). The EGR1 gene expression is activated during this treatment. Thus, by stably transfecting PC12 cells with a construct containing an EGR promoter linked to SEAP reporter, activation of PC12 cells by an albumin fusion protein of the present invention can be assessed.

[1173] The EGR/SEAP reporter construct can be assembled by the following protocol. The EGR-1 promoter sequence (−633 to +1)(Sakamoto K et al., Oncogene 6:867-871 (1991)) can be PCR amplified from human genomic DNA using the following primers:

(SEQ ID NO: 41)

5′ GCGCTCGAGGGATGACAGCGATAGAACCCCGG-3′

(SEQ ID NO: 42)

5′ GCGAAGCTTCGCGACTCCCCGGATCCGCCTC-3′

[1174] Using the GAS:SEAP/Neo vector produced in Example 29, EGR1 amplified product can then be inserted into this vector. Linearize the GAS:SEAP/Neo vector using restriction enzymes XhoI/HindIII, removing the GAS/SV40 stuffer. Restrict the EGR1 amplified product with these same enzymes. Ligate the vector and the EGR1 promoter.

[1175] To prepare 96 well-plates for cell culture, two mls of a coating solution (1:30 dilution of collagen type I (Upstate Biotech Inc. Cat#08-115) in 30% ethanol (filter sterilized)) is added per one 10 cm plate or 50 ml per well of the 96-well plate, and allowed to air dry for 2 hr.

[1176] PC12 cells are routinely grown in RPMI-1640 medium (Bio Whittaker) containing 10% horse serum (JRH BIOSCIENCES, Cat. #12449-78P), 5% heat-inactivated fetal bovine serum (FBS) supplemented with 100 units/ml penicillin and 100 ug/ml streptomycin on a precoated 10 cm tissue culture dish. One to four split is done every three to four days. Cells are removed from the plates by scraping and resuspended with pipetting up and down for more than 15 times.

[1177] Transfect the EGR/SEAP/Neo construct into PC12 using techniques known in the art. EGR-SEAP/PC12 stable cells are obtained by growing the cells in 300 ug/ml G418. The G418-free medium is used for routine growth but every one to two months, the cells should be re-grown in 300 ug/ml G418 for couple of passages.

[1178] To assay for neuronal activity, a 10 cm plate with cells around 70 to 80% confluent is screened by removing the old medium. Wash the cells once with PBS (Phosphate buffered saline). Then starve the cells in low serum medium (RPMI-1640 containing 1% horse serum and 0.5% FBS with antibiotics) overnight.

[1179] The next morning, remove the medium and wash the cells with PBS. Scrape off the cells from the plate, suspend the cells well in 2 ml low serum medium. Count the cell number and add more low serum medium to reach final cell density as 5×10⁵ cells/ml.

[1180] Add 200 ul of the cell suspension to each well of 96-well plate (equivalent to 1×10⁵ cells/well). Add a series of different concentrations of an albumin fusion protein of the inventon, 37 degree C. for 48 to 72 hr. As a positive control, a growth factor known to activate PC12 cells through EGR can be used, such as 50 ng/ul of Neuronal Growth Factor (NGF). Over fifty-fold induction of SEAP is typically seen in the positive control wells. SEAP assay may be routinely performed using techniques known in the art and/or as described in Example 30.

### Example 32

### Assay for T-Cell Activity

[1181] The following protocol is used to assess T-cell activity by identifying factors, and determining whether an albumin fusion protein of the invention proliferates and/or differentiates T-cells. T-cell activity is assessed using the GAS/SEAP/Neo construct produced in Example 29. Thus, factors that increase SEAP activity indicate the ability to activate the Jaks-STATS signal transduction pathway. The T-cell used in this assay is Jurkat T-cells (ATCC Accession No. TIB-152), although Molt-3 cells (ATCC Accession No. CRL-1552) and Molt-4 cells (ATCC Accession No. CRL-1582) cells can also be used.

[1182] Jurkat T-cells are lymphoblastic CD4+Th1 helper cells. In order to generate stable cell lines, approximately 2 million Jurkat cells are transfected with the GAS-SEAP/neo vector using DMRIE-C (Life Technologies) (transfection procedure described below). The transfected cells are seeded to a density of approximately 20,000 cells per well and transfectants resistant to 1 mg/ml genticin selected. Resistant colonies are expanded and then tested for their response to increasing concentrations of interferon gamma. The dose response of a selected clone is demonstrated.

[1183] Specifically, the following protocol will yield sufficient cells for 75 wells containing 200 ul of cells. Thus, it is either scaled up, or performed in multiple to generate sufficient cells for multiple 96 well plates. Jurkat cells are maintained in RPMI+10% serum with 1% Pen-Strep. Combine 2.5 mls of OPTI-MEM (Life Technologies) with 10 ug of plasmid DNA in a T25 flask. Add 2.5 ml OPTI-MEM containing 50 ul of DMRIE-C and incubate at room temperature for 15-45 mins.

[1184] During the incubation period, count cell concentration, spin down the required number of cells (10⁷ per transfection), and resuspend in OPTI-MEM to a final concentration of 10⁷ cells/ml. Then add 1 ml of 1×10⁷ cells in OPTI-MEM to T25 flask and incubate at 37 degree C. for 6 hrs. After the incubation, add 10 ml of RPMI+15% serum.

[1185] The Jurkat: GAS-SEAP stable reporter lines are maintained in RPMI+10% serum, 1 mg/ml Genticin, and 1% Pen-Strep. These cells are treated with varying concentrations of one or more fusion proteins of the present invention.

[1186] On the day of treatment with the fusion protein, the cells should be washed and resuspended in fresh RPMI+10% serum to a density of 500,000 cells per ml. The exact number of cells required will depend on the number of fusion proteins and the number of different concentrations of fusion proteins being screened. For one 96 well plate, approximately 10 million cells (for 10 plates, 100 million cells) are required.

[1187] The well dishes containing Jurkat cells treated with the fusion protein are placed in an incubator for 48 hrs (note: this time is variable between 48-72 hrs). 35 ul samples from each well are then transferred to an opaque 96 well plate using a 12 channel pipette. The opaque plates should be covered (using sellophene covers) and stored at −20 degree C. until SEAP assays are performed according to Example 30. The plates containing the remaining treated cells are placed at 4 degree C. and serve as a source of material for repeating the assay on a specific well if desired.

[1188] As a positive control, 100 Unit/ml interferon gamma can be used which is known to activate Jurkat T cells. Over 30 fold induction is typically observed in the positive control wells.

[1189] The above protocol may be used in the generation of both transient, as well as, stable transfected cells, which would be apparent to those of skill in the art.

### Example 33

### Assay for T-Cell Activity

[1190] NF-KB (Nuclear Factor KB) is a transcription factor activated by a wide variety of agents including the inflammatory cytokines IL-1 and TNF, CD30 and CD40, lymphotoxin-alpha and lymphotoxin-beta, by exposure to LPS or thrombin, and by expression of certain viral gene products. As a transcription factor, NF-KB regulates the expression of genes involved in immune cell activation, control of apoptosis (NF-KB appears to shield cells from apoptosis), B and T-cell development, anti-viral and antimicrobial responses, and multiple stress responses.

[1191] In non-stimulated conditions, NF-KB is retained in the cytoplasm with I-KB (Inhibitor KB). However, upon stimulation, I-KB is phosphorylated and degraded, causing NF-KB to shuttle to the nucleus, thereby activating transcription of target genes. Target genes activated by NF-KB include IL-2, IL-6, GM-CSF, ICAM-1 and class 1 MHC.

[1192] Due to its central role and ability to respond to a range of stimuli, reporter constructs utilizing the NF-KB promoter element are used to screen the fusion protein. Activators or inhibitors of NF-KB would be useful in treating, preventing, and/or diagnosing diseases. For example, inhibitors of NF-KB could be used to treat those diseases related to the acute or chronic activation of NF-KB, such as rheumatoid arthritis.

[1193] To construct a vector containing the NF-KB promoter element, a PCR based strategy is employed. The upstream primer contains four tandem copies of the NF-KB binding site (GGGGACTTTCCC) (SEQ ID NO: 43), 18 by of sequence complementary to the 5′ end of the SV40 early promoter sequence, and is flanked with an XhoI site:

(SEQ ID NO: 44)

5′:GCGGCCTCGAGGGGACTTTCCCGGGGACTTTCCGGGGACTTTCCGG
GACTTTCCATCCTGCCATCTCAATTAG:3′

[1194] The downstream primer is complementary to the 3′ end of the SV40 promoter and is flanked with a Hind III site: 5′:GCGGCAAGCTTTTTGCAAAGCCTAGGC:3′ (SEQ ID NO: 39)

[1195] PCR amplification is performed using the SV40 promoter template present in the pB-gal:promoter plasmid obtained from Clontech. The resulting PCR fragment is digested with XhoI and Hind III and subcloned into BLSK2-. (Stratagene) Sequencing with the T7 and T3 primers confirms the insert contains the following sequence:

(SEQ ID NO: 45)

5′:CTCGAGGGGACTTTCCCGGGGACTTTCCGGGGACTTTCCGGGACTT
TCCATCTGCCATCTCAATTAGTCAGCAACCATAGTCCCGCCCCTAACTC
CGCCCATCCCGCCCCTAACTCCGCCCAGTTCCGCCCATTCTCCGCCC
CATGGCTGACTAATTTTTTTTATTTATGCAGAGGCCGAGGCCGCCTCGG
CCTCTGAGCTATTCCAGAAGTAGTGAGGAGGCTTTTTTGGAGGCCTAGG
CTTTTGCAAAAAGCTT:3′

[1196] Next, replace the SV40 minimal promoter element present in the pSEAP2-promoter plasmid (Clontech) with this NF-KB/SV40 fragment using XhoI and HindIII. However, this vector does not contain a neomycin resistance gene, and therefore, is not preferred for mammalian expression systems.

[1197] In order to generate stable mammalian cell lines, the NF-KB/SV40/SEAP cassette is removed from the above NF-KB/SEAP vector using restriction enzymes SalI and NotI, and inserted into a vector containing neomycin resistance. Particularly, the NF-KB/SV40/SEAP cassette was inserted into pGFP-1 (Clontech), replacing the GFP gene, after restricting pGFP-1 with SalI and NotI.

[1198] Once NF-KB/SV40/SEAP/Neo vector is created, stable Jurkat T-cells are created and maintained according to the protocol described in Example 32. Similarly, the method for assaying fusion proteins with these stable Jurkat T-cells is also described in Example 32. As a positive control, exogenous TNF alpha (0.1, 1, 10 ng) is added to wells H9, H10, and H11, with a 5-10 fold activation typically observed.

### Example 33

### Assay Identifying Myeloid Activity

[1199] The following protocol is used to assess myeloid activity of an albumin fusion protein of the present invention by determining whether the fusion protein proliferates and/or differentiates myeloid cells. Myeloid cell activity is assessed using the GAS/SEAP/Neo construct produced in Example 29. Thus, factors that increase SEAP activity indicate the ability to activate the Jaks-STATS signal transduction pathway. The myeloid cell used in this assay is U937, a pre-monocyte cell line, although TF-1, HL60, or KG1 can be used.

[1200] To transiently transfect U937 cells with the GAS/SEAP/Neo construct produced in Example 29, a DEAE-Dextran method (Kharbanda et. al., 1994, Cell Growth & Differentiation, 5:259-265) is used. First, harvest 2×10⁷ U937 cells and wash with PBS. The U937 cells are usually grown in RPMI 1640 medium containing 10% heat-inactivated fetal bovine serum (FBS) supplemented with 100 units/ml penicillin and 100 mg/ml streptomycin.

[1201] Next, suspend the cells in 1 ml of 20 mM Tris-HCl (pH 7.4) buffer containing 0.5 mg/ml DEAF-Dextran, 8 ug GAS-SEAP2 plasmid DNA, 140 mM NaCl, 5 mM KCl, 375 uM Na₂HPO₄.7H₂O, 1 mM MgCl₂, and 675 uM CaCl₂. Incubate at 37 degrees C. for 45 min.

[1202] Wash the cells with RPMI 1640 medium containing 10% FBS and then resuspend in 10 ml complete medium and incubate at 37 degree C. for 36 hr.

[1203] The GAS-SEAP/U937 stable cells are obtained by growing the cells in 400 ug/ml G418. The G418-free medium is used for routine growth but every one to two months, the cells should be re-grown in 400 ug/ml G418 for couple of passages.

[1204] These cells are tested by harvesting 1×10⁸ cells (this is enough for ten 96-well plates assay) and wash with PBS. Suspend the cells in 200 ml above described growth medium, with a final density of 5×10⁵ cells/ml. Plate 200 ul cells per well in the 96-well plate (or 1×10⁵ cells/well).

[1205] Add different concentrations of the fusion protein. Incubate at 37 degee C. for 48 to 72 hr. As a positive control, 100 Unit/ml interferon gamma can be used which is known to activate U937 cells. Over 30 fold induction is typically observed in the positive control wells. SEAP assay the supernatant according to methods known in the art and/or the protocol described in Example 30.

### Example 34

### Assay Identifying Changes in Small Molecule Concentration and Membrane Permeability

[1206] Binding of a ligand to a receptor is known to alter intracellular levels of small molecules, such as calcium, potassium, sodium, and pH, as well as alter membrane potential. These alterations can be measured in an assay to identify fusion proteins which bind to receptors of a particular cell. Although the following protocol describes an assay for calcium, this protocol can easily be modified to detect changes in potassium, sodium, pH, membrane potential, or any other small molecule which is detectable by a fluorescent probe.

[1207] The following assay uses Fluorometric Imaging Plate Reader (“FLIPR”) to measure changes in fluorescent molecules (Molecular Probes) that bind small molecules. Clearly, any fluorescent molecule detecting a small molecule can be used instead of the calcium fluorescent molecule, fluo-4 (Molecular Probes, Inc.; catalog no. F-14202), used here.

[1208] For adherent cells, seed the cells at 10,000-20,000 cells/well in a Co-star black 96-well plate with clear bottom. The plate is incubated in a CO₂ incubator for 20 hours. The adherent cells are washed two times in Biotek washer with 200 ul of HBSS (Hank's Balanced Salt Solution) leaving 100 ul of buffer after the final wash.

[1209] A stock solution of 1 mg/ml fluo-4 is made in 10% pluronic acid DMSO. To load the cells with fluo-4, 50 ul of 12 ug/ml fluo-4 is added to each well. The plate is incubated at 37 degrees C. in a CO₂ incubator for 60 min. The plate is washed four times in the Biotek washer with HESS leaving 100 ul of buffer.

[1210] For non-adherent cells, the cells are spun down from culture media. Cells are re-suspended to 2-5×10⁶ cells/ml with HESS in a 50-ml conical tube. 4 ul of 1 mg/ml fluo-4 solution in 10% pluronic acid DMSO is added to each ml of cell suspension. The tube is then placed in a 37 degrees C. water bath for 30-60 min. The cells are washed twice with HBSS, resuspended to 1×10⁶ cells/ml, and dispensed into a microplate, 100 ul/well. The plate is centrifuged at 1000 rpm for 5 min. The plate is then washed once in Denley Cell Wash with 200 ul, followed by an aspiration step to 100 ul final volume.

[1211] For a non-cell based assay, each well contains a fluorescent molecule, such as fluo-4. The fusion protein of the invention is added to the well, and a change in fluorescence is detected.

[1212] To measure the fluorescence of intracellular calcium, the FLIPR is set for the following parameters: (1) System gain is 300-800 mW; (2) Exposure time is 0.4 second; (3) Camera F/stop is F/2; (4) Excitation is 488 nm; (5) Emission is 530 nm; and (6) Sample addition is 50 ul. Increased emission at 530 nm indicates an extracellular signaling event caused by an albumin fusion protein of the present invention or a molecule induced by an albumin fusion protein of the present invention, which has resulted in an increase in the intracellular Ca⁺⁺ concentration.

### Example 35

### Assay Identifying Tyrosine Kinase Activity

[1213] The Protein Tyrosine Kinases (PTK) represent a diverse group of transmembrane and cytoplasmic kinases. Within the Receptor Protein Tyrosine Kinase (RPTK) group are receptors for a range of mitogenic and metabolic growth factors including the PDGF, FGF, EGF, NGF, HGF and Insulin receptor subfamilies. In addition there are a large family of RPTKs for which the corresponding ligand is unknown. Ligands for RPTKs include mainly secreted small proteins, but also membrane-bound and extracellular matrix proteins.

[1214] Activation of RPTK by ligands involves ligand-mediated receptor dimerization, resulting in transphosphorylation of the receptor subunits and activation of the cytoplasmic tyrosine kinases. The cytoplasmic tyrosine kinases include receptor associated tyrosine kinases of the src-family (e.g., src, yes, lck, lyn, fyn) and non-receptor linked and cytosolic protein tyrosine kinases, such as the Jak family, members of which mediate signal transduction triggered by the cytokine superfamily of receptors (e.g., the Interleukins, Interferons, GM-CSF, and Leptin).

[1215] Because of the wide range of known factors capable of stimulating tyrosine kinase activity, identifying whether an albumin fusion protein of the present invention or a molecule induced by a fusion protein of the present invention is capable of activating tyrosine kinase signal transduction pathways is of interest. Therefore, the following protocol is designed to identify such molecules capable of activating the tyrosine kinase signal transduction pathways.

[1216] Seed target cells (e.g., primary keratinocytes) at a density of approximately 25,000 cells per well in a 96 well Loprodyne Silent Screen Plates purchased from Nalge Nunc (Naperville, Ill.). The plates are sterilized with two 30 minute rinses with 100% ethanol, rinsed with water and dried overnight. Some plates are coated for 2 hr with 100 ml of cell culture grade type I collagen (50 mg/ml), gelatin (2%) or polylysine (50 mg/ml), all of which can be purchased from Sigma Chemicals (St. Louis, Mo.) or 10% Matrigel purchased from Becton Dickinson (Bedford, Mass.), or calf serum, rinsed with PBS and stored at 4 degree C. Cell growth on these plates is assayed by seeding 5,000 cells/well in growth medium and indirect quantitation of cell number through use of alamarBlue as described by the manufacturer Alamar Biosciences, Inc. (Sacramento, Calif.) after 48 hr. Falcon plate covers #3071 from Becton Dickinson (Bedford, Mass.) are used to cover the Loprodyne Silent Screen Plates. Falcon Microtest III cell culture plates can also be used in some proliferation experiments.

[1217] To prepare extracts, A431 cells are seeded onto the nylon membranes of Loprodyne plates (20,000/200 ml/well) and cultured overnight in complete medium. Cells are quiesced by incubation in serum-free basal medium for 24 hr. After 5-20 minutes treatment with EGF (60 ng/ml) or a different concentrations of an albumin fusion protein of the invention, the medium was removed and 100 ml of extraction buffer ((20 mM HEPES pH 7.5, 0.15 M NaCl, 1% Triton X-100, 0.1% SDS, 2 mM Na3VO4, 2 mM Na4P2O7 and a cocktail of protease inhibitors (#1836170) obtained from Boeheringer Mannheim (Indianapolis, Ind.)) is added to each well and the plate is shaken on a rotating shaker for 5 minutes at 4° C. The plate is then placed in a vacuum transfer manifold and the extract filtered through the 0.45 mm membrane bottoms of each well using house vacuum. Extracts are collected in a 96-well catch/assay plate in the bottom of the vacuum manifold and immediately placed on ice. To obtain extracts clarified by centrifugation, the content of each well, after detergent solubilization for 5 minutes, is removed and centrifuged for 15 minutes at 4 degree C. at 16,000×g.

[1218] Test the filtered extracts for levels of tyrosine kinase activity. Although many methods of detecting tyrosine kinase activity are known, one method is described here.

[1219] Generally, the tyrosine kinase activity of an albumin fusion protein of the invention is evaluated by determining its ability to phosphorylate a tyrosine residue on a specific substrate (a biotinylated peptide). Biotinylated peptides that can be used for this purpose include PSK1 (corresponding to amino acids 6-20 of the cell division kinase cdc2-p34) and PSK2 (corresponding to amino acids 1-17 of gastrin). Both peptides are substrates for a range of tyrosine kinases and are available from Boehringer Mannheim.

[1220] The tyrosine kinase reaction is set up by adding the following components in order. First, add 10 ul of 5 uM Biotinylated Peptide, then 10 ul ATP/Mg₂₊ (5 mM ATP/50 mM MgCl₂), then 10 ul of 5× Assay Buffer (40 mM imidazole hydrochloride, pH7.3, 40 mM beta-glycerophosphate, 1 mM EGTA, 100 mM MgCl₂, 5 mM MnCl₂, 0.5 mg/ml BSA), then 5 ul of Sodium Vanadate (1 mM), and then 5 ul of water. Mix the components gently and preincubate the reaction mix at 30 degree C. for 2 min. Initial the reaction by adding 10 ul of the control enzyme or the filtered supernatant.

[1221] The tyrosine kinase assay reaction is then terminated by adding 10 ul of 120 mm EDTA and place the reactions on ice.

[1222] Tyrosine kinase activity is determined by transferring 50 ul aliquot of reaction mixture to a microtiter plate (MTP) module and incubating at 37 degree C. for 20 min. This allows the streptavidin coated 96 well plate to associate with the biotinylated peptide. Wash the MTP module with 300 ul/well of PBS four times. Next add 75 ul of anti-phosphotyrosine antibody conjugated to horse radish peroxidase (anti-P-Tyr-POD (0.5 u/ml)) to each well and incubate at 37 degree C. for one hour. Wash the well as above.

[1223] Next add 100 ul of peroxidase substrate solution (Boehringer Mannheim) and incubate at room temperature for at least 5 mins (up to 30 min). Measure the absorbance of the sample at 405 nm by using ELISA reader. The level of bound peroxidase activity is quantitated using an ELISA reader and reflects the level of tyrosine kinase activity.

### Example 36

### Assay Identifying Phosphorylation Activity

[1224] As a potential alternative and/or complement to the assay of protein tyrosine kinase activity described in Example 35, an assay which detects activation (phosphorylation) of major intracellular signal transduction intermediates can also be used. For example, as described below one particular assay can detect tyrosine phosphorylation of the Erk-1 and Erk-2 kinases. However, phosphorylation of other molecules, such as Raf, JNK, p38 MAP, Map kinase kinase (MEK), MEK kinase, Src, Muscle specific kinase (MuSK), IRAK, Tec, and Janus, as well as any other phosphoserine, phosphotyrosine, or phosphothreonine molecule, can be detected by substituting these molecules for Erk-1 or Erk-2 in the following assay.

[1225] Specifically, assay plates are made by coating the wells of a 96-well ELISA plate with 0.1 ml of protein G (1 ug/ml) for 2 hr at room temp, (RT). The plates are then rinsed with PBS and blocked with 3% BSA/PBS for 1 hr at RT. The protein G plates are then treated with 2 commercial monoclonal antibodies (100 ng/well) against Erk-1 and Erk-2 (1 hr at RT) (Santa Cruz Biotechnology). (To detect other molecules, this step can easily be modified by substituting a monoclonal antibody detecting any of the above described molecules.) After 3-5 rinses with PBS, the plates are stored at 4 degree C. until use.

[1226] A431 cells are seeded at 20,000/well in a 96-well Loprodyne filterplate and cultured overnight in growth medium. The cells are then starved for 48 hr in basal medium (DMEM) and then treated with EGF (6 ng/well) or varying concentrations of the fusion protein of the invention for 5-20 minutes. The cells are then solubilized and extracts filtered directly into the assay plate.

[1227] After incubation with the extract for 1 hr at RT, the wells are again rinsed. As a positive control, a commercial preparation of MAP kinase (10 ng/well) is used in place of A431 extract. Plates are then treated with a commercial polyclonal (rabbit) antibody (1 ug/ml) which specifically recognizes the phosphorylated epitope of the Erk-1 and Erk-2 kinases (1 hr at RT). This antibody is biotinylated by standard procedures. The bound polyclonal antibody is then quantitated by successive incubations with Europium-streptavidin and Europium fluorescence enhancing reagent in the Wallac DELFIA instrument (time-resolved fluorescence). An increased fluorescent signal over background indicates a phosphorylation by the fusion protein of the present invention or a molecule induced by an albumin fusion protein of the present invention.

### Example 37

### Assay for the Stimulation of Bone Marrow CD34+ Cell Proliferation

[1228] This assay is based on the ability of human CD34+ to proliferate in the presence of hematopoietic growth factors and evaluates the ability of fusion proteins of the inventon to stimulate proliferation of CD34+ cells.

[1229] It has been previously shown that most mature precursors will respond to only a single signal. More immature precursors require at least two signals to respond. Therefore, to test the effect of fusion proteins of the invention on hematopoietic activity of a wide range of progenitor cells, the assay contains a given fusion protein of the invention in the presence or absence of hematopoietic growth factors. Isolated cells are cultured for 5 days in the presence of Stem Cell Factor (SCF) in combination with tested sample. SCF alone has a very limited effect on the proliferation of bone marrow (BM) cells, acting in such conditions only as a “survival” factor. However, combined with any factor exhibiting stimulatory effect on these cells (e.g., IL-3), SCF will cause a synergistic effect. Therefore, if the tested fusion protein has a stimulatory effect on hematopoietic progenitors, such activity can be easily detected. Since normal BM cells have a low level of cycling cells, it is likely that any inhibitory effect of a given fusion protein might not be detected. Accordingly, assays for an inhibitory effect on progenitors is preferably tested in cells that are first subjected to in vitro stimulation with SCF+IL+3, and then contacted with the compound that is being evaluated for inhibition of such induced proliferation.

[1230] Briefly, CD34+ cells are isolated using methods known in the art. The cells are thawed and resuspended in medium (QBSF 60 serum-free medium with 1% L-glutamine (500 ml) Quality Biological, Inc., Gaithersburg, Md. Cat#160-204-101). After several gentle centrifugation steps at 200×g, cells are allowed to rest for one hour. The cell count is adjusted to 2.5×10⁵ cells/ml. During this time, 100 μl of sterile water is added to the peripheral wells of a 96-well plate. The cytokines that can be tested with an albumin fusion protein of the invention in this assay is rhSCF (R&D Systems, Minneapolis, Minn., Cat#255-SC) at 50 ng/ml alone and in combination with rhSCF and rhIL-3 (R&D Systems, Minneapolis, Minn., Cat# 203-ML) at 30 ng/ml. After one hour, 10 μl of prepared cytokines, varying concentrations of an albumin fusion protein of the invention, and 20 μl of diluted cells are added to the media which is already present in the wells to allow for a final total volume of 100 μl. The plates are then placed in a 37° C./5% CO₂ incubator for five days.

[1231] Eighteen hours before the assay is harvested, 0.5 μCi/well of [3H] Thymidine is added in a 10 μl volume to each well to determine the proliferation rate. The experiment is terminated by harvesting the cells from each 96-well plate to a filtermat using the Tomtec Harvester 96. After harvesting, the filtermats are dried, trimmed and placed into OmniFilter assemblies consisting of one OmniFilter plate and one OmniFilter Tray. 60 μl Microscint is added to each well and the plate sealed with TopSeal-A press-on sealing film A bar code 15 sticker is affixed to the first plate for counting. The sealed plates are then loaded and the level of radioactivity determined via the Packard Top Count and the printed data collected for analysis. The level of radioactivity reflects the amount of cell proliferation.

[1232] The studies described in this example test the activity of a given fusion protein to stimulate bone marrow CD34+ cell proliferation. One skilled in the art could easily modify the exemplified studies to test the activity of fusion proteins and polynucleotides of the invention (e.g., gene therapy) as well as agonists and antagonists thereof. The ability of an albumin fusion protein of the invention to stimulate the proliferation of bone marrow CD34+ cells indicates that the albumin fusion protein and/or polynucleotides corresponding to the fusion protein are useful for the diagnosis and treatment of disorders affecting the immune system and hematopoiesis. Representative uses are described in the “Immune Activity” and “Infectious Disease” sections above, and elsewhere herein.

### Example 38

### Assay for Extracellular Matrix Enhanced Cell Response (EMECR)

[1233] The objective of the Extracellular Matrix Enhanced Cell Response (EMECR) assay is to evaluate the ability of fusion proteins of the invention to act on hematopoietic stem cells in the context of the extracellular matrix (ECM) induced signal.

[1234] Cells respond to the regulatory factors in the context of signal(s) received from the surrounding microenvironment. For example, fibroblasts, and endothelial and epithelial stem cells fail to replicate in the absence of signals from the ECM. Hematopoietic stem cells can undergo self-renewal in the bone marrow, but not in in vitro suspension culture. The ability of stem cells to undergo self-renewal in vitro is dependent upon their interaction with the stromal cells and the ECM protein fibronectin (fn). Adhesion of cells to fn is mediated by the α₅β₁ and α₄β₁ integrin receptors, which are expressed by human and mouse hematopoietic stem cells. The factor(s) which integrate with the ECM environment and are responsible for stimulating stem cell self-renewal have a not yet been identified. Discovery of such factors should be of great interest in gene therapy and bone marrow transplant applications

[1235] Briefly, polystyrene, non tissue culture treated, 96-well plates are coated with fn fragment at a coating concentration of 0.2 μg/cm². Mouse bone marrow cells are plated (1,000 cells/well) in 0.2 ml of serum-free medium. Cells cultured in the presence of IL-3 (5 ng/ml)+SCF (50 ng/ml) would serve as the positive control, conditions under which little self-renewal but pronounced differentiation of the stem cells is to be expected. Albumin fusion proteins of the invention are tested with appropriate negative controls in the presence and absence of SCF (5.0 ng/ml), where volume of the administed composition containing the albumin fusion protein of the invention represents 10% of the total assay volume. The plated cells are then allowed to grow by incubating in a low oxygen environment (5% CO₂, 7% O₂, and 88% N₂) tissue culture incubator for 7 days. The number of proliferating cells within the wells is then quantitated by measuring thymidine incorporation into cellular DNA. Verification of the positive hits in the assay will require phenotypic characterization of the cells, which can be accomplished by scaling up of the culture system and using appropriate antibody reagents against cell surface antigens and FACScan.

[1236] One skilled in the art could easily modify the exemplified studies to test the activity of albumin fusion proteins and polynucleotides of the invention (e.g., gene therapy).

[1237] If a particular fusion protein of the present invention is found to be a stimulator of hematopoietic progenitors, the fusion protein and polynucleotides corresponding to the fusion protein may be useful for example, in the diagnosis and treatment of disorders affecting the immune system and hematopoiesis. Representative uses are described in the “Immune Activity” and “Infectious Disease” sections above, and elsewhere herein. The fusion protein may also be useful in the expansion of stem cells and committed progenitors of various blood lineages, and in the differentiation and/or proliferation of various cell types.

[1238] Additionally, the albumin fusion proteins of the invention and polynucleotides encoding albumin fusion proteins of the invention, may also be employed to inhibit the proliferation and differentiation of hematopoietic cells and therefore may be employed to protect bone marrow stem cells from chemotherapeutic agents during chemotherapy. This antiproliferative effect may allow administration of higher doses of chemotherapeutic agents and, therefore, more effective chemotherapeutic treatment.

[1239] Moreover, fusion proteins of the invention and polynucleotides encoding albumin fusion proteins of the invention may also be useful for the treatment and diagnosis of hematopoietic related disorders such as, anemia, pancytopenia, leukopenia, thrombocytopenia or leukemia, since stromal cells are important in the production of cells of hematopoietic lineages. The uses include bone marrow cell ex-vivo culture, bone marrow transplantation, bone marrow reconstitution, radiotherapy or chemotherapy of neoplasia.

### Example 39

### Human Dermal Fibroblast and Aortic Smooth Muscle Cell Proliferation

[1240] An albumin fusion protein of the invention is added to cultures of normal human dermal fibroblasts (NHDF) and human aortic smooth muscle cells (AoSMC) and two co-assays are performed with each sample. The first assay examines the effect of the fusion protein on the proliferation of normal human dermal fibroblasts (NHDF) or aortic smooth muscle cells (AoSMC). Aberrant growth of fibroblasts or smooth muscle cells is a part of several pathological processes, including fibrosis, and restenosis. The second assay examines IL6 production by both NHDF and SMC. IL6 production is an indication of functional activation. Activated cells will have increased production of a number of cytokines and other factors, which can result in a proinflammatory or immunomodulatory outcome. Assays are run with and without co-TNFa stimulation, in order to check for costimulatory or inhibitory activity.

[1241] Briefly, on day 1, 96-well black plates are set up with 1000 cells/well (NHDF) or 2000 cells/well (AoSMC) in 100 μl culture media. NHDF culture media contains: Clonetics FB basal media, 1 mg/ml hFGF, 5 mg/ml insulin, 50 mg/ml gentamycin, 2% FBS, while AoSMC culture media contains Clonetics SM basal media, 0.5 μg/ml hEGF, 5 mg/ml insulin, 1 μg/ml hFGF, 50 mg/ml gentamycin, 50 μg/ml Amphotericin B, 5% FBS. After incubation at 37° C. for at least 4-5 hours culture media is aspirated and replaced with growth arrest media. Growth arrest media for NHDF contains fibroblast basal media, 50 mg/ml gentamycin, 2% FBS, while growth arrest media for AoSMC contains SM basal media, 50 mg/ml gentamycin, 50 μg/ml Amphotericin B, 0.4% FBS. Incubate at 37° C. until day 2.

[1242] On day 2, serial dilutions and templates of an albumin fusion protein of the invention are designed such that they always include media controls and known-protein controls. For both stimulation and inhibition experiments, proteins are diluted in growth arrest media. For inhibition experiments, TNFa is added to a final concentration of 2 ng/ml (NHDF) or 5 ng/ml (AoSMC). Add ⅓ vol media containing controls or an albumin fusion protein of the invention and incubate at 37 degrees C./5% CO₂ until day 5.

[1243] Transfer 60 μl from each well to another labeled 96-well plate, cover with a plate-sealer, and store at 4 degrees C. until Day 6 (for IL6 ELISA). To the remaining 100 μl in the cell culture plate, aseptically add Alamar Blue in an amount equal to 10% of the culture volume (10 μl). Return plates to incubator for 3 to 4 hours. Then measure fluorescence with excitation at 530 nm and emission at 590 nm using the CytoFluor. This yields the growth stimulation/inhibition data.

[1244] On day 5, the IL6 ELISA is performed by coating a 96 well plate with 50-100 ul/well of Anti-Human IL6 Monoclonal antibody diluted in PBS, pH 7.4, incubate ON at room temperature.

[1245] On day 6, empty the plates into the sink and blot on paper towels. Prepare Assay Buffer containing PBS with 4% BSA. Block the plates with 200 μl/well of Pierce Super Block blocking buffer in PBS for 1-2 hr and then wash plates with wash buffer (PBS, 0.05% Tween-20). Blot plates on paper towels. Then add 50 μl/well of diluted Anti-Human IL-6 Monoclonal, Biotin-labeled antibody at 0.50 mg/ml. Make dilutions of IL-6 stock in media (30, 10, 3, 1, 0.3, 0 ng/ml). Add duplicate samples to top row of plate. Cover the plates and incubate for 2 hours at RT on shaker.

[1246] Plates are washed with wash buffer and blotted on paper towels. Dilute EU-labeled

[1247] Streptavidin 1:1000 in Assay buffer, and add 100 μl/well. Cover the plate and incubate 1 h at RT. Plates are again washed with wash buffer and blotted on paper towels.

[1248] Add 100 μl/well of Enhancement Solution. Shake for 5 minutes. Read the plate on the Wallac DELFIA Fluorometer. Readings from triplicate samples in each assay were tabulated and averaged.

[1249] A positive result in this assay suggests AoSMC cell proliferation and that the albumin fusion protein may be involved in dermal fibroblast proliferation and/or smooth muscle cell proliferation. A positive result also suggests many potential uses of the fusion protein and polynucleotides encoding the albumin fusion protein. For example, inflammation and immune responses, wound healing, and angiogenesis, as detailed throughout this specification. Particularly, fusion proteins may be used in wound healing and dermal regeneration, as well as the promotion of vasculogenesis, both of the blood vessels and lymphatics. The growth of vessels can be used in the treatment of, for example, cardiovascular diseases. Additionally, fusion proteins showing antagonistic activity in this assay may be useful in treating diseases, disorders, and/or conditions which involve angiogenesis by acting as an anti-vascular agent (e.g., anti-angiogenesis). These diseases, disorders, and/or conditions are known in the art and/or are described herein, such as, for example, malignancies, solid tumors, benign tumors, for example hemangiomas, acoustic neuromas, neurofibromas, trachomas, and pyogenic granulomas; artheroscleric plaques; ocular angiogenic diseases, for example, diabetic retinopathy, retinopathy of prematurity, macular degeneration, corneal graft rejection, neovascular glaucoma, retrolental fibroplasia, rubeosis, retinoblastoma, uvietis and Pterygia (abnormal blood vessel growth) of the eye; rheumatoid arthritis; psoriasis; delayed wound healing; endometriosis; vasculogenesis; granulations; hypertrophic scars (keloids); nonunion fractures; scleroderma; trachoma; vascular adhesions; myocardial angiogenesis; coronary collaterals; cerebral collaterals; arteriovenous malformations; ischemic limb angiogenesis; Osler-Webber Syndrome; plaque neovascularization; telangiectasia; hemophiliac joints; angiofibroma; fibromuscular dysplasia; wound granulation; Crohn's disease; and atherosclerosis. Moreover, albumin fusion proteins that act as antagonists in this assay may be useful in treating anti-hyperproliferative diseases and/or anti-inflammatory known in the art and/or described herein.

### Example 40

### Cellular Adhesion Molecule (CAM) Expression on Endothelial Cells

[1250] The recruitment of lymphocytes to areas of inflammation and angiogenesis involves specific receptor-ligand interactions between cell surface adhesion molecules (CAMs) on lymphocytes and the vascular endothelium. The adhesion process, in both normal and pathological settings, follows a multi-step cascade that involves intercellular adhesion molecule-1 (ICAM-1), vascular cell adhesion molecule-1 (VCAM-1), and endothelial leukocyte adhesion molecule-1 (E-selectin) expression on endothelial cells (EC). The expression of these molecules and others on the vascular endothelium determines the efficiency with which leukocytes may adhere to the local vasculature and extravasate into the local tissue during the development of an inflammatory response. The local concentration of cytokines and growth factor participate in the modulation of the expression of these CAMs.

[1251] Briefly, endothelial cells (e.g., Human Umbilical Vein Endothelial cells (HUVECs)) are grown in a standard 96 well plate to confluence, growth medium is removed from the cells and replaced with 100 μl of 199 Medium (10% fetal bovine serum (FBS)). Samples for testing (containing an albumin fusion protein of the invention) and positive or negative controls are added to the plate in triplicate (in 10 μl volumes). Plates are then incubated at 37° C. for either 5 h (selectin and integrin expression) or 24 h (integrin expression only). Plates are aspirated to remove medium and 100 μl of 0.1% paraformaldehyde-PBS (with Ca++ and Mg++) is added to each well. Plates are held at 4° C. for 30 min. Fixative is removed from the wells and wells are washed 1× with PBS(+Ca,Mg)+0.5% BSA and drained. 10 μl of diluted primary antibody is added to the test and control wells. Anti-ICAM-1-Biotin, Anti-VCAM-1-Biotin and Anti-E-selectin-Biotin are used at a concentration of 10 μg/ml (1:10 dilution of 0.1 mg/ml stock antibody). Cells are incubated at 37° C. for 30 min. in a humidified environment. Wells are washed three times with PBS(+Ca,Mg)+0.5% BSA. 20 μl of diluted ExtrAvidin-Alkaline Phosphatase (1:5,000 dilution, referred to herein as the working dilution) are added to each well and incubated at 37° C. for 30 min. Wells are washed three times with PBS(+Ca,Mg)+0.5% BSA. Dissolve 1 tablet of p-Nitrophenol Phosphate pNPP per 5 ml of glycine buffer (pH 10.4). 100 μl of pNPP substrate in glycine buffer is added to each test well. Standard wells in triplicate are prepared from the working dilution of the ExtrAvidin-Alkaline Phosphotase in glycine buffer: 1:5,000 (10⁰)>10^{-0.5}>10⁻¹>10^{-1.5}0.5 μl of each dilution is added to triplicate wells and the resulting AP content in each well is 5.50 ng, 1.74 ng, 0.55 ng, 0.18 ng. 100 μl of pNNP reagent is then added to each of the standard wells. The plate is incubated at 37° C. for 4 h. A volume of 50 μl of 3M NaOH is added to all wells. The plate is read on a plate reader at 405 nm using the background subtraction option on blank wells filled with glycine buffer only. Additionally, the template is set up to indicate the concentration of AP-conjugate in each standard well [5.50 ng; 1.74 ng; 0.55 ng; 0.18 ng]. Results are indicated as amount of bound AP-conjugate in each sample.

### Example 41

### Alamar Blue Endothelial Cells Proliferation Assay

[1252] This assay may be used to quantitatively determine protein mediated inhibition of bFGF-induced proliferation of Bovine Lymphatic Endothelial Cells (LECs), Bovine Aortic Endothelial Cells (BAECs) or Human Microvascular Uterine Myometrial Cells (UTMECs). This assay incorporates a fluorometric growth indicator based on detection of metabolic activity. A standard Alamar Blue Proliferation Assay is prepared in EGM-2MV with 10 ng/ml of bFGF added as a source of endothelial cell stimulation. This assay may be used with a variety of endothelial cells with slight changes in growth medium and cell concentration. Dilutions of protein batches to be tested are diluted as appropriate. Serum-free medium (GIBCO SFM) without bFGF is used as a non-stimulated control and Angiostatin or TSP-1 are included as a known inhibitory controls.

[1253] Briefly, LEC, BAECs or UTMECs are seeded in growth media at a density of 5000 to 2000 cells/well in a 96 well plate and placed at 37 degrees C. overnight. After the overnight incubation of the cells, the growth media is removed and replaced with GIBCO EC-SFM. The cells are treated with the appropriate dilutions of an albumin fusion protein of the invention or control protein sample(s) (prepared in SFM) in triplicate wells with additional bFGF to a concentration of 10 ng/ml. Once the cells have been treated with the samples, the plate(s) is/are placed back in the 37° C. incubator for three days. After three days 10 ml of stock alamar blue (Biosource Cat# DAL1100) is added to each well and the plate(s) is/are placed back in the 37° C. incubator for four hours. The plate(s) are then read at 530 nm excitation and 590 nm emission using the CytoFluor fluorescence reader. Direct output is recorded in relative fluorescence units.

[1254] Alamar blue is an oxidation-reduction indicator that both fluoresces and changes color in response to chemical reduction of growth medium resulting from cell growth. As cells grow in culture, innate metabolic activity results in a chemical reduction of the immediate surrounding environment. Reduction related to growth causes the indicator to change from oxidized (non-fluorescent blue) form to reduced (fluorescent red) form (i.e., stimulated proliferation will produce a stronger signal and inhibited proliferation will produce a weaker signal and the total signal is proportional to the total number of cells as well as their metabolic activity). The background level of activity is observed with the starvation medium alone. This is compared to the output observed from the positive control samples (bFGF in growth medium) and protein dilutions.

### Example 42

### Detection of Inhibition of a Mixed Lymphocyte Reaction

[1255] This assay can be used to detect and evaluate inhibition of a Mixed Lymphocyte Reaction (MLR) by fusion proteins of the invention. Inhibition of a MLR may be due to a direct effect on cell proliferation and viability, modulation of costimulatory molecules on interacting cells, modulation of adhesiveness between lymphocytes and accessory cells, or modulation of cytokine production by accessory cells. Multiple cells may be targeted by the albumin fusion proteins that inhibit MLR since the peripheral blood mononuclear fraction used in this assay includes T, B and natural killer lymphocytes, as well as monocytes and dendritic cells.

[1256] Albumin fusion proteins of the invention found to inhibit the MLR may find application in diseases associated with lymphocyte and monocyte activation or proliferation. These include, but are not limited to, diseases such as asthma, arthritis, diabetes, inflammatory skin conditions, psoriasis, eczema, systemic lupus erythematosus, multiple sclerosis, glomerulonephritis, inflammatory bowel disease, crohn's disease, ulcerative colitis, arteriosclerosis, cirrhosis, graft vs. host disease, host vs. graft disease, hepatitis, leukemia and lymphoma.

[1257] Briefly, PBMCs from human donors are purified by density gradient centrifugation using Lymphocyte Separation Medium (LSM®, density 1.0770 g/ml, Organon Teknika Corporation, West Chester, Pa.). PBMCs from two donors are adjusted to 2×10⁶ cells/ml in RPMI-1640 (Life Technologies, Grand Island, N.Y.) supplemented with 10% FCS and 2 mM glutamine. PBMCs from a third donor is adjusted to 2×10⁵ cells/ml. Fifty microliters of PBMCs from each donor is added to wells of a 96-well round bottom microtiter plate. Dilutions of the fusion protein test material (50 μl) is added in triplicate to microtiter wells. Test samples (of the protein of interest) are added for final dilution of 1:4; rhuIL-2 (R&D Systems, Minneapolis, Minn., catalog number 202-IL) is added to a final concentration of 1 μg/ml; anti-CD4 mAb (R&D Systems, clone 34930.11, catalog number MAB379) is added to a final concentration of 10 μg/ml. Cells are cultured for 7-8 days at 37° C. in 5% CO₂, and 1 μC of [³H] thymidine is added to wells for the last 16 hrs of culture. Cells are harvested and thymidine incorporation determined using a Packard TopCount. Data is expressed as the mean and standard deviation of triplicate determinations.

[1258] Samples of the fusion protein of interest are screened in separate experiments and compared to the negative control treatment, anti-CD4 mAb, which inhibits proliferation of lymphocytes and the positive control treatment, IL-2 (either as recombinant material or supernatant), which enhances proliferation of lymphocytes.

### Example 43

### Assays for Protease Activity

[1259] The following assay may be used to assess protease activity of an albumin fusion protein of the invention.

[1260] Gelatin and casein zymography are performed essentially as described (Heusen et al., Anal. Biochem., 102:196-202 (1980); Wilson et al., Journal of Urology, 149:653-658 (1993)). Samples are run on 10% polyacryamide/0.1% SDS gels containing 1% gelain orcasein, soaked in 2.5% triton at room temperature for 1 hour, and in 0.1M glycine, pH 8.3 at 37° C. 5 to 16 hours. After staining in amido black areas of proteolysis spear as clear areas agains the blue-black background. Trypsin (Sigma T8642) is used as a positive control.

[1261] Protease activity is also determined by monitoring the cleavage of n-a-benzoyl-L-arginine ethyl ester (BABE) (Sigma B-4500. Reactions are set up in (25 mMNaPO₄, 1 mM EDTA, and 1 mM BAEE), pH 7.5. Samples are added and the change in absorbance at 260 nm is monitored on the Beckman DU-6 spectrophotometer in the time-drive mode. Trypsin is used as a positive control.

[1262] Additional assays based upon the release of acid-soluble peptides from casein or hemoglobin measured as absorbance at 280 nm or colorimetrically using the Folin method are performed as described in Bergmeyer, et al., Methods of Enzymatic Analysis, 5 (1984). Other assays involve the solubilization of chromogenic substrates (Ward, Applied Science, 251-317 (1983)).

### Example 44

### Identifying Serine Protease Substrate Specificity

[1263] Methods known in the art or described herein may be used to determine the substrate specificity of the albumin fusion proteins of the present invention having serine protease activity. A preferred method of determining substrate specificity is by the use of positional scanning synthetic combinatorial libraries as described in GB 2 324 529 (incorporated herein in its entirety).

### Example 45

### Ligand Binding Assays

[1264] The following assay may be used to assess ligand binding activity of an albumin fusion protein of the invention.

[1265] Ligand binding assays provide a direct method for ascertaining receptor pharmacology and are adaptable to a high throughput format. The purified ligand for an albumin fusion protein of the invention is radiolabeled to high specific activity (50-2000 Ci/mmol) for binding studies. A determination is then made that the process of radiolabeling does not diminish the activity of the ligand towards the fusion protein. Assay conditions for buffers, ions, pH and other modulators such as nucleotides are optimized to establish a workable signal to noise ratio for both membrane and whole cell polypeptide sources. For these assays, specific polypeptide binding is defined as total associated radioactivity minus the radioactivity measured in the presence of an excess of unlabeled competing ligand. Where possible, more than one competing ligand is used to define residual nonspecific binding.

### Example 46

### Functional Assay in Xenopus Oocytes

[1266] Capped RNA transcripts from linearized plasmid templates encoding an albumin fusion protein of the invention is synthesized in vitro with RNA polymerases in accordance with standard procedures. In vitro transcripts are suspended in water at a final concentration of 0.2 mg/ml. Ovarian lobes are removed from adult female toads, Stage V defolliculated oocytes are obtained, and RNA transcripts (10 ng/oocytc) are injected in a 50 nl bolus using a microinjection apparatus. Two electrode voltage clamps are used to measure the currents from individual Xenopus oocytes in response fusion protein and polypeptide agonist exposure. Recordings are made in Ca2+ free Barth's medium at room temperature. The Xenopus system can be used to screen known ligands and tissue/cell extracts for activating ligands.

### Example 47

### Microphysiometric Assays

[1267] Activation of a wide variety of secondary messenger systems results in extrusion of small amounts of acid from a cell. The acid formed is largely as a result of the increased metabolic activity required to fuel the intracellular signaling process. The pH changes in the media surrounding the cell are very small but are detectable by the CYTOSENSOR microphysiometer (Molecular Devices Ltd., Menlo Park, Calif.). The CYTOSENSOR is thus capable of detecting the ability of an albumin fusion protein of the invention to activate secondary messengers that are coupled to an energy utilizing intracellular signaling pathway.

### Example 48

### Extract/Cell Supernatant Screening

[1268] A large number of mammalian receptors exist for which there remains, as yet, no cognate activating ligand (agonist). Thus, active ligands for these receptors may not be included within the ligands banks as identified to date. Accordingly, the albumin fusion proteins of the invention can also be functionally screened (using calcium, cAMP, microphysiometer, oocyte electrophysiology, etc., functional screens) against tissue extracts to identify natural ligands for the Therapeutic protein portion and/or albumin protein portion of an albumin fusion protein of the invention. Extracts that produce positive functional responses can be sequentially subfractionated until an activating ligand is isolated and identified.

### Example 49

### ATP-Binding Assay

[1269] The following assay may be used to assess ATP-binding activity of fusion proteins of the invention.

[1270] ATP-binding activity of an albumin fusion protein of the invention may be detected using the ATP-binding assay described in U.S. Pat. No. 5,858,719, which is herein incorporated by reference in its entirety. Briefly, ATP-binding to an albumin fusion protein of the invention is measured via photoaffinity labeling with 8-azido-ATP in a competition assay. Reaction mixtures containing 1 mg/ml of ABC transport protein are incubated with varying concentrations of ATP, or the non-hydrolyzable ATP analog adenyl-5′-imidodiphosphate for 10 minutes at 4° C. A mixture of 8-azido-ATP (Sigma Chem. Corp., St. Louis, Mo.) plus 8-azido-ATP (³²P-ATP) (5 mCi/μmol, ICN, Irvine Calif.) is added to a final concentration of 100 μM and 0.5 ml aliquots are placed in the wells of a porcelain spot plate on ice. The plate is irradiated using a short wave 254 nm UV lamp at a distance of 2.5 cm from the plate for two one-minute intervals with a one-minute cooling interval in between. The reaction is stopped by addition of dithiothreitol to a final concentration of 2 mM. The incubations are subjected to SDS-PAGE electrophoresis, dried, and autoradiographed. Protein bands corresponding to the albumin fusion proteins of the invention are excised, and the radioactivity quantified. A decrease in radioactivity with increasing ATP or adenly-5′-imidodiphosphate provides a measure of ATP affinity to the fusion protein.

### Example 50

### Phosphorylation Assay

[1271] In order to assay for phosphorylation activity of an albumin fusion protein of the invention, a phosphorylation assay as described in U.S. Pat. No. 5,958,405 (which is herein incorporated by reference) is utilized. Briefly, phosphorylation activity may be measured by phosphorylation of a protein substrate using gamma-labeled ³²P-ATP and quantitation of the incorporated radioactivity using a gamma radioisotope counter. The fusion protein of the invention is incubated with the protein substrate, ³²P-ATP, and a kinase buffer. The ³²P incorporated into the substrate is then separated from free ³²P-ATP by electrophoresis, and the incorporated ³²P is counted and compared to a negative control. Radioactivity counts above the negative control are indicative of phosphorylation activity of the fusion protein.

### Example 51

### Detection of Phosphorylation Activity (Activation) of an Albumin Fusion Protein of the Invention in the Presence of Polypeptide Ligands

[1272] Methods known in the art or described herein may be used to determine the phosphorylation activity of an albumin fusion protein of the invention. A preferred method of determining phosphorylation activity is by the use of the tyrosine phosphorylation assay as described in U.S. Pat. No. 5,817,471 (incorporated herein by reference).

### Example 52

### Identification of Signal Transduction Proteins that Interact with an Albumin Fusion Protein of the Present Invention

[1273] Albumin fusion proteins of the invention may serve as research tools for the identification, characterization and purification of signal transduction pathway proteins or receptor proteins. Briefly, a labeled fusion protein of the invention is useful as a reagent for the purification of molecules with which it interacts. In one embodiment of affinity purification, an albumin fusion protein of the invention is covalently coupled to a chromatography column. Cell-free extract derived from putative target cells, such as carcinoma tissues, is passed over the column, and molecules with appropriate affinity bind to the albumin fusion protein. The protein complex is recovered from the column, dissociated, and the recovered molecule subjected to N-terminal protein sequencing. This amino acid sequence is then used to identify the captured molecule or to design degenerate oligonucleotide probes for cloning the relevant gene from an appropriate cDNA library.

### Example 53

### IL-6 Bioassay

[1274] A variety of assays are known in the art for testing the proliferative effects of an albumin fusion protein of the invention. For example, one such asssay is the IL-6 Bioassay as described by Marz et al. (Proc. Natl. Acad. Sci., U.S.A., 95:3251-56 (1998), which is herein incorporated by reference). After 68 hrs. at 37° C., the number of viable cells is measured by adding the tetrazolium salt thiazolyl blue (MIT) and incubating for a further 4 hrs. at 37° C. B9 cells are lysed by SDS and optical density is measured at 570 nm. Controls containing IL-6 (positive) and no cytokine (negative) are Briefly, IL-6 dependent B9 murine cells are washed three times in IL-6 free medium and plated at a concentration of 5,000 cells per well in 50 μl, and 50 μl of fusion protein of the invention is added. utilized. Enhanced proliferation in the test sample(s) (containing an albumin fusion protein of the invention) relative to the negative control is indicative of proliferative effects mediated by the fusion protein.

### Example 54

### Support of Chicken Embryo Neuron Survival

[1275] To test whether sympathetic neuronal cell viability is supported by an albumin fusion protein of the invention, the chicken embryo neuronal survival assay of Senaldi et al may be utilized (Proc. Natl. Acad. Sci., U.S.A., 96:11458-63 (1998), which is herein incorporated by reference). Briefly, motor and sympathetic neurons are isolated from chicken embryos, resuspended in L15 medium (with 10% FCS, glucose, sodium selenite, progesterone, conalbumin, putrescine, and insulin; Life Technologies, Rockville, Md.) and Dulbecco's modified Eagles medium [with 10% FCS, glutamine, penicillin, and 25 mM Hepes buffer (pH 7.2); Life Technologies, Rockville, Md.], respectively, and incubated at 37° C. in 5% CO₂ in the presence of different concentrations of the purified fusion protein of the invention, as well as a negative control lacking any cytokine. After 3 days, neuron survival is determined by evaluation of cellular morphology, and through the use of the colorimetric assay of Mosmann (Mosmann, T., J. Immunol. Methods, 65:55-63 (1983)). Enhanced neuronal cell viability as compared to the controls lacking cytokine is indicative of the ability of the albumin fusion protein to enhance the survival of neuronal cells.

### Example 55

### Assay for Phosphatase Activity

[1276] The following assay may be used to assess serine/threonine phosphatase (PTPase) activity of an albumin fusion protein of the invention.

[1277] In order to assay for serine/threonine phosphatase (PTPase) activity, assays can be utilized which are widely known to those skilled in the art. For example, the serine/threonine phosphatase (PSPase) activity of an albumin fusion protein of the invention may be measured using a PSPase assay kit from New England Biolabs, Inc. Myelin basic protein (MyBP), a substrate for PSPase, is phosphorylated on serine and threonine residues with cAMP-dependent Protein Kinase in the presence of [³²P]ATP. Protein serine/threonine phosphatase activity is then determined by measuring the release of inorganic phosphate from ³²P-labeled MyBP.

### Example 56

### Interaction of Serine/Threonine Phosphatases with Other Proteins

[1278] Fusion protein of the invention having serine/threonine phosphatase activity (e.g., as determined in Example 55) are useful, for example, as research tools for the identification, characterization and purification of additional interacting proteins or receptor proteins, or other signal transduction pathway proteins. Briefly, a labeled fusion protein of the invention is useful as a reagent for the purification of molecules with which it interacts. In one embodiment of affinity purification, an albumin fusion protein of the invention is covalently coupled to a chromatography column. Cell-free extract derived from putative target cells, such as neural or liver cells, is passed over the column, and molecules with appropriate affinity bind to the fusion protein. The fusion protein-complex is recovered from the column, dissociated, and the recovered molecule subjected to N-terminal protein sequencing. This amino acid sequence is then used to identify the captured molecule or to design degenerate oligonucleotide probes for cloning the relevant gene from an appropriate cDNA library.

### Example 57

### Assaying for Heparanase Activity

[1279] There a numerous assays known in the art that may be employed to assay for heparanase activity of an albumin fusion protein of the invention. In one example, heparanase activity of an albumin fusion protein of the invention, is assayed as described by Vlodaysky et al., (Vlodaysky et al., Nat. Med., 5:793-802 (1999)). Briefly, cell lysates, conditioned media, intact cells (1×10⁶ cells per 35-mm dish), cell culture supernatant, or purified fusion protein are incubated for 18 hrs at 37° C., pH 6.2-6.6, with ³⁵S-labeled ECM or soluble ECM derived peak I proteoglycans. The incubation medium is centrifuged and the supernatant is analyzed by gel filtration on a Sepharose CL-6B column (0.9×30 cm). Fractions are eluted with PBS and their radioactivity is measured. Degradation fragments of heparan sulfate side chains are eluted from Sepharose 6B at 0.5<Kₐᵥ<0.8 (peak II). Each experiment is done at least three times. Degradation fragments corresponding to “peak II,” as described by Vlodaysky et al., is indicative of the activity of an albumin fusion protein of the invention in cleaving heparan sulfate.

### Example 58

### Immobilization of Biomolecules

[1280] This example provides a method for the stabilization of an albumin fusion protein of the invention in non-host cell lipid bilayer constucts (see, e.g., Bieri et al., Nature Biotech 17:1105-1108 (1999), hereby incorporated by reference in its entirety herein) which can be adapted for the study of fusion proteins of the invention in the various functional assays described above. Briefly, carbohydrate-specific chemistry for biotinylation is used to confine a biotin tag to an albumin fusion protein of the invention, thus allowing uniform orientation upon immobilization. A 50 uM solution of an albumin fusion protein of the invention in washed membranes is incubated with 20 mM NaIO4 and 1.5 mg/ml (4 mM) BACH or 2 mg/ml (7.5 mM) biotin-hydrazide for 1 hr at room temperature (reaction volume, 150 ul). Then the sample is dialyzed (Pierce Slidealizer Cassett, 10 kDa cutoff; Pierce Chemical Co., Rockford Ill.) at 4 C first for 5 h, exchanging the buffer after each hour, and finally for 12 h against 500 ml buffer R (0.15 M NaCl, 1 mM MgCl₂, 10 mM sodium phosphate, pH7). Just before addition into a cuvette, the sample is diluted 1:5 in buffer ROG50 (Buffer R supplemented with 50 mM octylglucoside).

### Example 59

### Assays for Metalloproteinase Activity

[1281] Metalloproteinases are peptide hydrolases which use metal ions, such as Zn²⁺, as the catalytic mechanism. Metalloproteinase activity of an albumin fusion protein of the present invention can be assayed according to methods known in the art. The following exemplary methods are provided:

[1282] Proteolysis of Alpha-2-Macroglobulin

[1283] To confirm protease activity, a purified fusion protein of the invention is mixed with the substrate alpha-2-macroglobulin (0.2 unit/ml; Boehringer Mannheim, Germany) in 1× assay buffer (50 mM HEPES, pH 7.5, 0.2 M NaCl, 10 mM CaCl₂, 25 μM ZnCl₂ and 0.05% Brij-35) and incubated at 37° C. for 1-5 days. Trypsin is used as positive control. Negative controls contain only alpha-2-macroglobulin in assay buffer. The samples are collected and boiled in SDS-PAGE sample buffer containing 5% 2-mercaptoethanol for 5-min, then loaded onto 8% SDS-polyacrylamide gel. After electrophoresis the proteins are visualized by silver staining. Proteolysis is evident by the appearance of lower molecular weight bands as compared to the negative control.

[1284] Inhibition of Alpha-2-Macroglobulin Proteolysis by Inhibitors of Metalloproteinases

[1285] Known metalloproteinase inhibitors (metal chelators (EDTA, EGTA, AND HgCl₂), peptide metalloproteinase inhibitors (TIMP-1 and TIMP-2), and commercial small molecule MMP inhibitors) may also be used to characterize the proteolytic activity of an albumin fusion protein of the invention. Three synthetic MMP inhibitors that may be used are: MMP inhibitor I, [IC₅₀=1.0 μM against MMP-1 and MMP-8; IC₅₀=30 μM against MMP-9; IC₅₀=150 μM against MMP-3]; MMP-3 (stromelysin-1) inhibitor I [IC₅₀=5 μM against MMP-3], and MMP-3 inhibitor II [Kᵢ=130 nM against MMP-3]; inhibitors available through Calbiochem, catalog #444250, 444218, and 444225, respectively). Briefly, different concentrations of the small molecule MMP inhibitors are mixed with a purified fusion protein of the invention (50 μg/ml) in 22.9 μl of 1×HEPES buffer (50 mM HEPES, pH 7.5, 0.2 M NaCl, 10 mM CaCl₂, 25 μM ZnCl₂ and 0.05% Brij-35) and incubated at room temperature (24° C.) for 2-hr, then 7.1 μl of substrate alpha-2-macroglobulin (0.2 unit/ml) is added and incubated at 37° C. for 20-hr. The reactions are stopped by adding 4× sample buffer and boiled immediately for 5 minutes. After SDS-PAGE, the protein bands are visualized by silver stain.

[1286] Synthetic Fluorogenic Peptide Substrates Cleavage Assay

[1287] The substrate specificity for fusion proteins of the invention with demonstrated metalloproteinase activity may be determined using techniques known in the art, such as using synthetic fluorogenic peptide substrates (purchased from BACHEM Bioscience Inc). Test substrates include, M-1985, M-2225, M-2105, M-2110, and M-2255. The first four are MMP substrates and the last one is a substrate of tumor necrosis factor-α (TNF-α) converting enzyme (TACE). These substrastes are preferably prepared in 1:1 dimethyl sulfoxide (DMSO) and water. The stock solutions are 50-500 μM. Fluorescent assays are performed by using a Perkin Elmer LS 50B luminescence spectrometer equipped with a constant temperature water bath. The excitation λ is 328 nm and the emission λ is 393 nm. Briefly, the assay is carried out by incubating 176 μl 1×HEPES buffer (0.2 M NaCl, 10 mM CaCl₂, 0.05% Brij-35 and 50 mM HEPES, pH 7.5) with 4 μl of substrate solution (50 μM) at 25° C. for 15 minutes, and then adding 20 μl of a purified fusion protein of the invention into the assay cuvett. The final concentration of substrate is 1 μM. Initial hydrolysis rates are monitored for 30-min.

### Example 60

### Identification and Cloning of VH and VL Domains

[1288] One method to identfy and clone VH and VL domains from cell lines expressing a particular antibody is to perform PCR with VH and VL specific primers on cDNA made from the antibody expressing cell lines. Briefly, RNA is isolated from the cell lines and used as a template for RT-PCR designed to amplify the VH and VL domains of the antibodies expressed by the EBV cell lines. Cells may be lysed in the TRIzol® reagent (Life Technologies, Rockville. MD) and extracted with one fifth volume of chloroform. After addition of chloroform, the solution is allowed to incubate at room temperature for 10 minutes, and the centrifuged at 14,000 rpm for 15 minutes at 4° C. in a tabletop centrifuge. The supernatant is collected and RNA is precipitated using an equal volume of isopropanol. Precipitated RNA is pelleted by centrifuging at 14,000 rpm for 15 minutes at 4° C. in a tabletop centrifuge. Following centrifugation, the supernatant is discarded and washed with 75% ethanol. Follwing washing, the RNA is centrifuged again at 800 rpm for 5 minutes at 4° C. The supernatant is discarded and the pellet allowed to air dry. RNA is the dissolved in DEPC water and heated to 60° C. for 10 minutes. Quantities of RNA can determined using optical density measurements.

[1289] cDNA may be synthesized, according to methods well-known in the art, from 1.5-2.5 micrograms of RNA using reverse transciptase and random hexamer primers. cDNA is then used as a template for PCR amplification of VH and VL domains. Primers used to amplify VH and VL genes are shown in Table 3. Typically a PCR reaction makes use of a single 5′ primer and a single 3′ primer. Sometimes, when the amount of available RNA template is limiting, or for greater efficiency, groups of 5′ and/or 3′ primers may be used. For example, sometimes all five VH-5′ primers and all JH3′ primers are used in a single PCR reaction. The PCR reaction is carried out in a 50 microliter volume containing 1×PCR buffer, 2 mM of each dNTP, 0.7 units of High Fidelity Taq polymerse, 5′ primer mix, 3′ primer mix and 7.5 microliters of cDNA. The 5′ and 3′ primer mix of both VH and VL can be made by pooling together 22 pmole and 28 pmole, respectively, of each of the individual primers. PCR conditions are: 96° C. for 5 minutes; followed by 25 cycles of 94° C. for 1 minute, 50° C. for 1 minute, and 72° C. for 1 minute; followed by an extension cycle of 72° C. for 10 minutes. After the reaction is completed, sample tubes are stored 4° C.

TABLE 3
Primer Sequences Used to Amplify VH and
VL domains.

| Primer name | SEQ ID NO | Primer Sequence (5′-3′) |
|---|---|---|
| VH Primers | | |
| Hu VH1-5′ | 36 | CAGGTGCAGCTGGTGCAGTCTGG |
| Hu VH2-5′ | 37 | CAGGTCAACTTAAGGGAGTCTGG |
| Hu VH3-5′ | 38 | GAGGTGCAGCTGGTGGAGTCTGG |
| Hu VH4-5′ | 39 | CAGGTGCAGCTGCAGGAGTCGGG |
| Hu VH5-5′ | 40 | GAGGTGCAGCTGTTGCAGTCTGC |
| Hu VH6-5′ | 41 | CAGGTACAGCTGCAGCAGTCAGG |
| Hu JH1,2-5′ | 42 | TGAGGAGACGGTGACCAGGGTGCC |
| Hu JH3-5′ | 43 | TGAAGAGACGGTGACCATTGTCCC |
| Hu JH4,5-5′ | 44 | TGAGGAGACGGTGACCAGGGTTCC |
| Hu JH6-5′ | 45 | TGAGGAGACGGTGACCGTGGTCCC |
| VL Primers | | |
| Hu Vkappa1-5′ | 46 | GACATCCAGATGACCCAGTCTCC |
| Hu Vkappa2a-5′ | 47 | GATGTTGTGATGACTCAGTCTCC |
| Hu Vkappa2b-5′ | 48 | GATATTGTGATGACTCAGTCTCC |
| Hu Vkappa3-5′ | 49 | GAAATTGTGTTGACGCAGTCTCC |
| Hu Vkappa4-5′ | 50 | GACATCGTGATGACCCAGTCTCC |
| Hu Vkappa5-5′ | 51 | GAAACGACACTCACGCAGTCTCC |
| Hu Vkappa6-5′ | 52 | GAAATTGTGCTGACTCAGTCTCC |
| Hu Vlambda1-5′ | 53 | CAGTCTGTGTTGACGCAGCCGCC |
| Hu Vlambda2-5′ | 54 | CAGTCTGCCCTGACTCAGCCTGC |
| Hu Vlambda3-5′ | 55 | TCCTATGTGCTGACTCAGCCACC |
| Hu Vlambda3b-5′ | 56 | TCTTCTGAGCTGACTCAGGACCC |
| Hu Vlambda4-5′ | 57 | CACGTTATACTGACTCAACCGCC |
| Hu Vlambda5-5′ | 58 | CAGGCTGTGCTCACTCAGCCGTC |
| Hu Vlambda6-5′ | 59 | AATTTTATGCTGACTCAGCCCCA |
| Hu Jkappa1-3′ | 60 | ACGTTTGATTTCCACCTTGGTCCC |
| Hu Jkappa2-3′ | 61 | ACGTTTGATCTCCAGCTTGGTCCC |
| Hu Jkappa3-3′ | 62 | ACGTTTGATATCCACTTTGGTCCC |
| Hu Jkappa4-3′ | 63 | ACGTTTGATCTCCACCTTGGTCCC |
| Hu Jkappa5-3′ | 64 | ACGTTTAATCTCCAGTCGTGTCCC |
| Hu Jlambda1-3′ | 65 | CAGTCTGTGTTGACGCAGCCGCC |
| Hu Jlambda2-3′ | 66 | CAGTCTGCCCTGACTCAGCCTGC |
| Hu Jlambda3--3′ | 67 | TCCTATGTGCTGACTCAGCCACC |
| Hu Jlambda3b-3′ | 68 | TCTTCTGAGCTGACTCAGGACCC |
| Hu Jlambda4-3′ | 69 | CACGTTATACTGACTCAACCGCC |
| Hu Jlambda5-3′ | 70 | CAGGCTGTGCTCACTCAGCCGTC |
| Hu Jlambda6-3′ | 71 | AATTTTATGCTGACTCAGCCCCA |

[1290] PCR samples are then electrophoresed on a 1.3% agarose gel. DNA bands of the expected sizes (−506 base pairs for VH domains, and 344 base pairs for VL domains) can be cut out of the gel and purified using methods well known in the art. Purified PCR products can be ligated into a PCR cloning vector (TA vector from Invitrogen Inc., Carlsbad, Calif.). Individual cloned PCR products can be isolated after transfection of E. coli and blue/white color selection. Cloned PCR products may then be sequenced using methods commonly known in the art.

[1291] The PCR bands containing the VH domain and the VL domains can also be used to create full-length Ig expression vectors. VH and VL domains can be cloned into vectors containing the nucleotide sequences of a heavy (e.g., human IgG1 or human IgG4) or light chain (human kappa or human lambda) constant regions such that a complete heavy or light chain molecule could be expressed from these vectors when transfected into an appropriate host cell. Further, when cloned heavy and light chains are both expressed in one cell line (from either one or two vectors), they can assemble into a complete functional antibody molecule that is secreted into the cell culture medium. Methods using polynucleotides encoding VH and VL antibody domain to generate expression vectors that encode complete antibody molecules are well known within the art.

[1292] It will be clear that the invention may be practiced otherwise than as particularly described in the foregoing description and examples. Numerous modifications and variations of the present invention are possible in light of the above teachings and, therefore, are within the scope of the appended claims.

[1293] The entire disclosure of each document cited (including patents, patent applications, patent publications, journal articles, abstracts, laboratory manuals, books, or other disclosures) as well as information available through Identifiers specific to databases such as GenBank, GeneSeq, or the CAS Registry, referred to in this application are herein incorporated by reference in their entirety. The specification and sequence listing of each of the following U.S. applications are herein incorporated by reference in their entirety:

| ApplNumber | File Date | ApplNumber | File Date |
|---|---|---|---|
| 60/047,599 | 23-May-1997 | US00/06824 | 16-Mar-2000 |
| 60/043,576 | 11-Apr-1997 | 60/126,051 | 23-Mar-1999 |
| 60/043,578 | 11-Apr-1997 | 60/169,906 | 10-Dec-1999 |
| 60/043,568 | 11-Apr-1997 | US00/06765 | 16-Mar-2000 |
| 60/040,162 | 07-Mar-1997 | 60/125,362 | 19-Mar-1999 |
| 60/047,601 | 23-May-1997 | US00/06792 | 16-Mar-2000 |
| 60/047,632 | 23-May-1997 | 60/169,980 | 10-Dec-1999 |
| 60/047,595 | 23-May-1997 | US00/06830 | 16-Mar-2000 |
| 60/056,845 | 22-Aug-1997 | 60/125,361 | 19-Mar-1999 |
| 60/056,664 | 22-Aug-1997 | 60/169,910 | 10-Dec-1999 |
| 60/056,892 | 22-Aug-1997 | 60/125,812 | 23-Mar-1999 |
| 60/056,632 | 22-Aug-1997 | 60/169,936 | 10-Dec-1999 |
| 60/043,580 | 11-Apr-1997 | US00/06782 | 16-Mar-2000 |
| 60/043,314 | 11-Apr-1997 | 60/126,054 | 23-Mar-1999 |
| 60/056,631 | 22-Aug-1997 | US00/06822 | 16-Mar-2000 |
| 60/043,674 | 11-Apr-1997 | 60/169,916 | 10-Dec-1999 |
| 60/043,670 | 11-Apr-1997 | US00/06791 | 16-Mar-2000 |
| 60/043,569 | 11-Apr-1997 | 60/169,946 | 10-Dec-1999 |
| 60/043,671 | 11-Apr-1997 | 60/125,815 | 23-Mar-1999 |
| 60/047,596 | 23-May-1997 | 60/125,358 | 19-Mar-1999 |
| 60/056,876 | 22-Aug-1997 | US00/06828 | 16-Mar-2000 |
| 60/047,612 | 23-May-1997 | 60/169,616 | 08-Dec-1999 |
| 60/047,588 | 23-May-1997 | 60/125,364 | 19-Mar-1999 |
| 60/056,864 | 22-Aug-1997 | 60/169,623 | 08-Dec-1999 |
| 60/043,311 | 11-Apr-1997 | US00/06823 | 16-Mar-2000 |
| 60/040,333 | 07-Mar-1997 | 60/169,617 | 08-Dec-1999 |
| 60/043,312 | 11-Apr-1997 | US00/06781 | 16-Mar-2000 |
| 60/056,909 | 22-Aug-1997 | 60/125,363 | 19-Mar-1999 |
| 60/056,910 | 22-Aug-1997 | 60/172,410 | 17-Dec-1999 |
| 60/056,636 | 22-Aug-1997 | 60/126,502 | 26-Mar-1999 |
| 60/047,586 | 23-May-1997 | US00/07505 | 22-Mar-2000 |
| 60/043,315 | 11-Apr-1997 | 60/126,503 | 26-Mar-1999 |
| 60/043,669 | 11-Apr-1997 | 60/172,409 | 17-Dec-1999 |
| 60/043,672 | 11-Apr-1997 | US00/07440 | 22-Mar-2000 |
| 60/047,585 | 23-May-1997 | 60/126,505 | 26-Mar-1999 |
| 60/047,598 | 23-May-1997 | 60/172,412 | 17-Dec-1999 |
| 60/056,874 | 22-Aug-1997 | US00/07506 | 22-Mar-2000 |
| 60/047,582 | 23-May-1997 | 60/126,594 | 26-Mar-1999 |
| 60/056,881 | 22-Aug-1997 | 60/172,408 | 17-Dec-1999 |
| 60/043,313 | 11-Apr-1997 | US00/07507 | 22-Mar-2000 |
| 60/047,613 | 23-May-1997 | 60/172,413 | 17-Dec-1999 |
| 60/038,621 | 07-Mar-1997 | US00/07535 | 22-Mar-2000 |
| 60/040,161 | 07-Mar-1997 | 60/126,511 | 26-Mar-1999 |
| 60/056,911 | 22-Aug-1997 | 60/126,595 | 26-Mar-1999 |
| 60/047,492 | 23-May-1997 | 60/171,549 | 22-Dec-1999 |
| 60/047,584 | 23-May-1997 | US00/07525 | 22-Mar-2000 |
| 60/047,500 | 23-May-1997 | 60/171,504 | 22-Dec-1999 |
| 60/047,587 | 23-May-1997 | 60/126,598 | 26-Mar-1999 |
| 60/056,880 | 22-Aug-1997 | US00/07534 | 22-Mar-2000 |
| 60/056,894 | 22-Aug-1997 | US00/07483 | 22-Mar-2000 |
| 60/056,879 | 22-Aug-1997 | 60/171,552 | 22-Dec-1999 |
| 60/047,590 | 23-May-1997 | 60/126,596 | 26-Mar-1999 |
| 60/047,581 | 23-May-1997 | 60/126,600 | 26-Mar-1999 |
| 60/047,592 | 23-May-1997 | US00/07526 | 22-Mar-2000 |
| 60/056,637 | 22-Aug-1997 | 60/171,550 | 22-Dec-1999 |
| 60/047,503 | 23-May-1997 | 60/126,501 | 26-Mar-1999 |
| 60/056,903 | 22-Aug-1997 | 60/171,551 | 22-Dec-1999 |
| 60/056,888 | 22-Aug-1997 | US00/07527 | 22-Mar-2000 |
| 60/040,626 | 07-Mar-1997 | 60/126,504 | 26-Mar-1999 |
| 60/056,882 | 22-Aug-1997 | US00/07661 | 23-Mar-2000 |
| 60/056,875 | 22-Aug-1997 | 60/174,847 | 07-Jan-2000 |
| 60/047,501 | 23-May-1997 | 60/174,853 | 07-Jan-2000 |
| 60/056,878 | 22-Aug-1997 | US00/07579 | 23-Mar-2000 |
| 60/056,662 | 22-Aug-1997 | 60/126,509 | 26-Mar-1999 |
| 160/056,872 | 22-Aug-1997 | 60/174,852 | 07-Jan-2000 |
| 60/047,589 | 23-May-1997 | 60/242,710 | 25-Oct-2000 |
| 60/056,884 | 22-Aug-1997 | 60/126,506 | 26-Mar-1999 |
| 60/056,862 | 22-Aug-1997 | US00/07723 | 23-Mar-2000 |
| 60/040,334 | 07-Mar-1997 | 60/174,850 | 07-Jan-2000 |
| 60/047,583 | 23-May-1997 | US00/07724 | 23-Mar-2000 |
| 60/047,618 | 23-May-1997 | 60/126,510 | 26-Mar-1999 |
| 60/047,594 | 23-May-1997 | 60/138,573 | 11-Jun-1999 |
| 60/047,617 | 23-May-1997 | US00/14929 | 01-Jun-2000 |
| 60/047,633 | 23-May-1997 | 60/174,851 | 07-Jan-2000 |
| 60/047,593 | 23-May-1997 | 60/126,508 | 26-Mar-1999 |
| 60/056,630 | 22-Aug-1997 | US00/07722 | 23-Mar-2000 |
| 60/047,502 | 23-May-1997 | 60/174,871 | 07-Jan-2000 |
| 60/040,336 | 07-Mar-1997 | US00/07578 | 23-Mar-2000 |
| 60/056,887 | 22-Aug-1997 | 60/174,872 | 07-Jan-2000 |
| 60/056,893 | 22-Aug-1997 | 60/126,507 | 26-Mar-1999 |
| 60/056,889 | 22-Aug-1997 | 60/174,877 | 07-Jan-2000 |
| 60/047,614 | 23-May-1997 | US00/07726 | 23-Mar-2000 |
| 60/047,615 | 23-May-1997 | 60/126,597 | 26-Mar-1999 |
| 60/040,163 | 07-Mar-1997 | 60/126,601 | 26-Mar-1999 |
| 60/047,597 | 23-May-1997 | US00/07677 | 23-Mar-2000 |
| 60/056,877 | 22-Aug-1997 | 60/176,064 | 14-Jan-2000 |
| 60/047,600 | 23-May-1997 | 60/154,373 | 17-Sep-1999 |
| 60/056,908 | 22-Aug-1997 | 60/176,063 | 14-Jan-2000 |
| 60/056,886 | 22-Aug-1997 | US00/07725 | 23-Mar-2000 |
| 60/040,710 | 14-Mar-1997 | 60/126,602 | 26-Mar-1999 |
| 60/050,934 | 30-May-1997 | 60/176,052 | 14-Jan-2000 |
| 60/048,100 | 30-May-1997 | US00/09070 | 06-Apr-2000 |
| 60/048,189 | 30-May-1997 | 60/128,695 | 09-Apr-1999 |
| 60/048,357 | 30-May-1997 | US00/08982 | 06-Apr-2000 |
| 60/040,762 | 14-Mar-1997 | 60/128,696 | 09-Apr-1999 |
| 60/041,277 | 21-Mar-1997 | 60/176,069 | 14-Jan-2000 |
| 60/048,135 | 30-May-1997 | 60/176,068 | 14-Jan-2000 |
| 60/048,350 | 30-May-1997 | US00/08983 | 06-Apr-2000 |
| 60/048,094 | 30-May-1997 | 60/128,703 | 09-Apr-1999 |
| 60/048,188 | 30-May-1997 | 60/176,929 | 20-Jan-2000 |
| 60/048,099 | 30-May-1997 | US00/09067 | 06-Apr-2000 |
| 60/050,937 | 30-May-1997 | 60/128,697 | 09-Apr-1999 |
| 60/042,344 | 21-Mar-1997 | US00/09066 | 06-Apr-2000 |
| 60/048,352 | 30-May-1997 | 60/176,926 | 20-Jan-2000 |
| 60/048,187 | 30-May-1997 | 60/128,698 | 09-Apr-1999 |
| 60/048,186 | 30-May-1997 | US00/09068 | 06-Apr-2000 |
| 60/048,095 | 30-May-1997 | 60/128,699 | 09-Apr-1999 |
| 60/048,131 | 30-May-1997 | 60/177,050 | 20-Jan-2000 |
| 60/048,069 | 30-May-1997 | 60/177,166 | 20-Jan-2000 |
| 60/041,276 | 21-Mar-1997 | US00/08981 | 06-Apr-2000 |
| 60/048,096 | 30-May-1997 | 60/128,701 | 09-Apr-1999 |
| 60/048,154 | 30-May-1997 | 60/128,700 | 09-Apr-1999 |
| 60/048,160 | 30-May-1997 | 60/176,930 | 20-Jan-2000 |
| 60/041,281 | 21-Mar-1997 | US00/08980 | 06-Apr-2000 |
| 60/048,355 | 30-May-1997 | 60/128,694 | 09-Apr-1999 |
| 60/048,351 | 30-May-1997 | US00/09071 | 06-Apr-2000 |
| 60/048,068 | 30-May-1997 | 60/176,931 | 20-Jan-2000 |
| 60/042,825 | 08-Apr-1997 | US00/09069 | 06-Apr-2000 |
| 60/048,184 | 30-May-1997 | 60/177,049 | 20-Jan-2000 |
| 60/042,727 | 08-Apr-1997 | 60/128,702 | 09-Apr-1999 |
| 60/048,070 | 30-May-1997 | 60/138,629 | 11-Jun-1999 |
| 60/042,728 | 08-Apr-1997 | US00/15136 | 01-Jun-2000 |
| 60/042,726 | 08-Apr-1997 | 60/138,628 | 11-Jun-1999 |
| 60/042,754 | 08-Apr-1997 | US00/14926 | 01-Jun-2000 |
| 60/048,190 | 30-May-1997 | 60/138,631 | 11-Jun-1999 |
| 60/044,039 | 30-May-1997 | US00/14963 | 01-Jun-2000 |
| 60/048,093 | 30-May-1997 | 60/138,632 | 11-Jun-1999 |
| 60/057,645 | 05-Sep-1997 | US00/15135 | 01-Jun-2000 |
| 60/049,375 | 06-Jun-1997 | US00/14934 | 01-Jun-2000 |
| 60/048,885 | 06-Jun-1997 | 60/138,599 | 11-Jun-1999 |
| 60/057,668 | 05-Sep-1997 | 60/138,572 | 11-Jun-1999 |
| 60/057,642 | 05-Sep-1997 | US00/14933 | 01-Jun-2000 |
| 60/057,635 | 05-Sep-1997 | US00/15137 | 01-Jun-2000 |
| 60/048,881 | 06-Jun-1997 | 60/138,625 | 11-Jun-1999 |
| 60/048,880 | 06-Jun-1997 | 60/138,633 | 11-Jun-1999 |
| 60/049,020 | 06-Jun-1997 | US00/14928 | 01-Jun-2000 |
| 60/057,667 | 05-Sep-1997 | 60/,138,630 | 11-Jun-1999 |
| 60/057,666 | 05-Sep-1997 | US00/14973 | 01-Jun-2000 |
| 60/048,876 | 06-Jun-1997 | US00/14964 | 01-Jun-2000 |
| 60/057,627 | 05-Sep-1997 | 60/138,627 | 11-Jun-1999 |
| 60/048,896 | 06-Jun-1997 | US00/26376 | 26-Sep-2000 |
| 60/057,764 | 05-Sep-1997 | 60/155,808 | 27-Sep-1999 |
| 60/048,895 | 06-Jun-1997 | US00/26371 | 26-Sep-2000 |
| 60/048,884 | 06-Jun-1997 | 60/155,804 | 27-Sep-1999 |
| 60/057,769 | 05-Sep-1997 | 60/155,807 | 27-Sep-1999 |
| 60/057,643 | 05-Sep-1997 | US00/26324 | 26-Sep-2000 |
| 60/048,894 | 06-Jun-1997 | US00/26323 | 26-Sep-2000 |
| 60/048,971 | 06-Jun-1997 | 60/155,805 | 27-Sep-1999 |
| 60/057,763 | 05-Sep-1997 | US00/26337 | 26-Sep-2000 |
| 60/057,584 | 05-Sep-1997 | 60/155,806 | 27-Sep-1999 |
| 60/048,964 | 06-Jun-1997 | 60/201,194 | 02-May-2000 |
| 60/048,893 | 06-Jun-1997 | 60/212,142 | 16-Jun-2000 |
| 60/057,661 | 05-Sep-1997 | US00/29363 | 25-Oct-2000 |
| 60/048,899 | 06-Jun-1997 | 60/215,139 | 30-Jun-2000 |
| 60/057,647 | 05-Sep-1997 | 60/162,239 | 29-Oct-1999 |
| 60/048,882 | 06-Jun-1997 | US00/29360 | 25-Oct-2000 |
| 60/057,650 | 05-Sep-1997 | 60/162,211 | 29-Oct-1999 |
| 60/048,892 | 06-Jun-1997 | 60/215,138 | 30-Jun-2000 |
| 60/048,901 | 06-Jun-1997 | 60/162,240 | 29-Oct-1999 |
| 60/048,900 | 06-Jun-1997 | US00/29362 | 25-Oct-2000 |
| 60/057,646 | 05-Sep-1997 | 60/215,131 | 30-Jun-2000 |
| 60/057,651 | 05-Sep-1997 | US00/29365 | 25-Oct-2000 |
| 60/057,662 | 05-Sep-1997 | 60/162,237 | 29-Oct-1999 |
| 60/048,915 | 06-Jun-1997 | 60/219,666 | 21-Jul-2000 |
| 60/057,654 | 05-Sep-1997 | 60/215,134 | 30-Jun-2000 |
| 60/048,916 | 06-Jun-1997 | US00/29364 | 25-Oct-2000 |
| 60/048,972 | 06-Jun-1997 | 60/162,238 | 29-Oct-1999 |
| 60/057,775 | 05-Sep-1997 | 60/163,580 | 05-Nov-1999 |
| 60/057,644 | 05-Sep-1997 | 60/215,130 | 30-Jun-2000 |
| 60/049,019 | 06-Jun-1997 | US00/30040 | 01-Nov-2000 |
| 60/057,765 | 05-Sep-1997 | US00/30037 | 01-Nov-2000 |
| 60/048,970 | 06-Jun-1997 | 60/163,577 | 05-Nov-1999 |
| 60/057,762 | 05-Sep-1997 | 60/215,137 | 30-Jun-2000 |
| 60/057,774 | 05-Sep-1997 | 60/215,133 | 30-Jun-2000 |
| 60/057,649 | 05-Sep-1997 | 60/163,581 | 05-Nov-1999 |
| 60/057,648 | 05-Sep-1997 | US00/30045 | 01-Nov-2000 |
| 60/049,374 | 06-Jun-1997 | 60/163,576 | 05-Nov-1999 |
| 60/048,875 | 06-Jun-1997 | US00/30036 | 01-Nov-2000 |
| 60/049,373 | 06-Jun-1997 | 60/221,366 | 27-Jul-2000 |
| 60/057,771 | 05-Sep-1997 | 60/221,367 | 27-Jul-2000 |
| 60/048,917 | 06-Jun-1997 | 60/195,296 | 07-Apr-2000 |
| 60/048,949 | 06-Jun-1997 | US00/30039 | 01-Nov-2000 |
| 60/057,770 | 05-Sep-1997 | 60/164,344 | 09-Nov-1999 |
| 60/048,897 | 06-Jun-1997 | 60/221,142 | 27-Jul-2000 |
| 60/057,761 | 05-Sep-1997 | US00/30654 | 08-Nov-2000 |
| 60/057,776 | 05-Sep-1997 | 60/164,835 | 12-Nov-1999 |
| 60/057,760 | 05-Sep-1997 | 60/164,744 | 12-Nov-1999 |
| 60/048,974 | 06-Jun-1997 | US00/30628 | 08-Nov-2000 |
| 60/048,883 | 06-Jun-1997 | 60/215,140 | 30-Jun-2000 |
| 60/048,898 | 06-Jun-1997 | US00/30653 | 08-Nov-2000 |
| 60/057,778 | 05-Sep-1997 | 60/164,735 | 12-Nov-1999 |
| 60/057,629 | 05-Sep-1997 | 60/221,193 | 27-Jul-2000 |
| 60/057,777 | 05-Sep-1997 | 60/222,904 | 03-Aug-2000 |
| 60/048,962 | 06-Jun-1997 | 60/164,825 | 12-Nov-1999 |
| 60/048,963 | 06-Jun-1997 | US00/30629 | 08-Nov-2000 |
| 60/048,878 | 06-Jun-1997 | 60/224,007 | 04-Aug-2000 |
| 60/048,877 | 06-Jun-1997 | US00/30679 | 08-Nov-2000 |
| 60/057,628 | 05-Sep-1997 | 60/164,834 | 12-Nov-1999 |
| 60/057,634 | 05-Sep-1997 | 60/164,750 | 12-Nov-1999 |
| 60/058,669 | 12-Sep-1997 | 60/215,128 | 30-Jun-2000 |
| 60/058,668 | 12-Sep-1997 | US00/30674 | 08-Nov-2000 |
| 60/058,750 | 12-Sep-1997 | 60/166,415 | 19-Nov-1999 |
| 60/049,566 | 13-Jun-1997 | US00/31162 | 15-Nov-2000 |
| 60/052,989 | 13-Jun-1997 | 60/215,136 | 30-Jun-2000 |
| 60/049,608 | 13-Jun-1997 | 60/166,414 | 19-Nov-1999 |
| 60/049,609 | 13-Jun-1997 | 60/219,665 | 21-Jul-2000 |
| 60/049,607 | 13-Jun-1997 | US00/31282 | 15-Nov-2000 |
| 60/058,665 | 12-Sep-1997 | 60/215,132 | 30-Jun-2000 |
| 60/058,971 | 12-Sep-1997 | 60/164,731 | 12-Nov-1999 |
| 60/058,972 | 12-Sep-1997 | US00/30657 | 08-Nov-2000 |
| 60/058,975 | 12-Sep-1997 | 60/256,968 | 21-Dec-2000 |
| 60/049,611 | 13-Jun-1997 | 60/226,280 | 18-Aug-2000 |
| 60/050,901 | 13-Jun-1997 | US01/01396 | 17-Jan-2001 |
| 60/056,250 | 29-Aug-1997 | 60/226,380 | 18-Aug-2000 |
| 60/056,296 | 29-Aug-1997 | US01/01387 | 17-Jan-2001 |
| 60/056,293 | 29-Aug-1997 | 60/259,803 | 05-Jan-2001 |
| 60/048,356 | 30-May-1997 | US01/01567 | 17-Jan-2001 |
| 60/048,101 | 30-May-1997 | 60/228,084 | 28-Aug-2000 |
| 60/050,935 | 30-May-1997 | US01/01431 | 17-Jan-2001 |
| 60/049,550 | 13-Jun-1997 | 60/231,968 | 12-Sep-2000 |
| 60/049,610 | 13-Jun-1997 | 60/234,211 | 20-Sep-2000 |
| 60/060,841 | 02-Oct-1997 | US01/00544 | 09-Jan-2001 |
| 60/060,834 | 02-Oct-1997 | 60/226,282 | 18-Aug-2000 |
| 60/061,060 | 02-Oct-1997 | US01/01435 | 17-Jan-2001 |
| 60/049,606 | 13-Jun-1997 | 60/232,104 | 12-Sep-2000 |
| 60/049,548 | 13-Jun-1997 | US01/01386 | 17-Jan-2001 |
| 60/049,549 | 13-Jun-1997 | 60/234,210 | 20-Sep-2000 |
| 60/060,865 | 02-Oct-1997 | US01/01565 | 17-Jan-2001 |
| 60/060,844 | 02-Oct-1997 | 60/259,805 | 05-Jan-2001 |
| 60/049,547 | 13-Jun-1997 | US01/01394 | 17-Jan-2001 |
| 60/061,059 | 02-Oct-1997 | 60/226,278 | 18-Aug-2000 |
| 60/051,480 | 01-Jul-1997 | 60/259,678 | 05-Jan-2001 |
| 60/051,381 | 01-Jul-1997 | 60/226,279 | 18-Aug-2000 |
| 60/058,663 | 12-Sep-1997 | US01/01434 | 17-Jan-2001 |
| 60/058,598 | 12-Sep-1997 | 60/226,281 | 18-Aug-2000 |
| 60/051,925 | 08-Jul-1997 | US01/01397 | 17-Jan-2001 |
| 60/052,793 | 08-Jul-1997 | 60/231,969 | 12-Sep-2000 |
| 60/058,664 | 12-Sep-1997 | US01/01385 | 17-Jan-2001 |
| 60/058,660 | 12-Sep-1997 | 60/228,086 | 28-Aug-2000 |
| 60/058,661 | 12-Sep-1997 | 60/259,516 | 04-Jan-2001 |
| 60/051,926 | 08-Jul-1997 | US01/01384 | 17-Jan-2001 |
| 60/051,929 | 08-Jul-1997 | 60/228,083 | 28-Aug-2000 |
| 60/058,785 | 12-Sep-1997 | 60/259,804 | 05-Jan-2001 |
| 60/055,722 | 18-Aug-1997 | US01/01383 | 17-Jan-2001 |
| 60/051,932 | 08-Jul-1997 | 60/064,988 | 07-Nov-1997 |
| 60/052,732 | 08-Jul-1997 | 60/064,912 | 07-Nov-1997 |
| 60/052,803 | 08-Jul-1997 | 60/064,900 | 07-Nov-1997 |
| 60/055,949 | 18-Aug-1997 | 60/064,983 | 07-Nov-1997 |
| 60/055,948 | 18-Aug-1997 | 60/064,911 | 07-Nov-1997 |
| 60/055,723 | 18-Aug-1997 | 60/064,985 | 07-Nov-1997 |
| 60/051,931 | 08-Jul-1997 | 60/064,908 | 07-Nov-1997 |
| 60/051,930 | 08-Jul-1997 | 60/064,984 | 07-Nov-1997 |
| 60/051,920 | 08-Jul-1997 | 60/064,987 | 07-Nov-1997 |
| 60/051,918 | 08-Jul-1997 | 60/066,100 | 17-Nov-1997 |
| 60/051,916 | 08-Jul-1997 | 60/066,095 | 17-Nov-1997 |
| 60/055,953 | 18-Aug-1997 | 60/066,089 | 17-Nov-1997 |
| 60/055,950 | 18-Aug-1997 | 60/066,090 | 17-Nov-1997 |
| 60/055,947 | 18-Aug-1997 | 60/066,094 | 17-Nov-1997 |
| 60/055,964 | 18-Aug-1997 | 60/068,007 | 18-Dec-1997 |
| 60/056,360 | 18-Aug-1997 | 60/068,006 | 18-Dec-1997 |
| 60/055,954 | 18-Aug-1997 | 60/068,008 | 18-Dec-1997 |
| 60/055,984 | 18-Aug-1997 | 60/068,057 | 18-Dec-1997 |
| 60/055,684 | 18-Aug-1997 | 60/070,923 | 18-Dec-1997 |
| 60/052,795 | 08-Jul-1997 | 60/068,053 | 18-Dec-1997 |
| 60/052,733 | 08-Jul-1997 | 60/068,054 | 18-Dec-1997 |
| 60/051,928 | 08-Jul-1997 | 60/068,064 | 18-Dec-1997 |
| 60/051,919 | 08-Jul-1997 | 60/068,369 | 19-Dec-1997 |
| 60/055,952 | 18-Aug-1997 | 60/068,367 | 19-Dec-1997 |
| 60/055,985 | 18-Aug-1997 | 60/068,169 | 19-Dec-1997 |
| 60/056,359 | 18-Aug-1997 | 60/068,365 | 19-Dec-1997 |
| 60/055,725 | 18-Aug-1997 | 60/070,704 | 07-Jan-1998 |
| 60/052,661 | 16-Jul-1997 | 60/070,657 | 07-Jan-1998 |
| 60/052,870 | 16-Jul-1997 | 60/070,658 | 07-Jan-1998 |
| 60/052,871 | 16-Jul-1997 | 60/070,692 | 07-Jan-1998 |
| 60/052,872 | 16-Jul-1997 | 60/073,160 | 30-Jan-1998 |
| 60/052,875 | 16-Jul-1997 | 60/073,159 | 30-Jan-1998 |
| 60/052,873 | 16-Jul-1997 | 60/073,165 | 30-Jan-1998 |
| 60/052,874 | 16-Jul-1997 | 60/073,164 | 30-Jan-1998 |
| 60/055,724 | 18-Aug-1997 | 60/073,167 | 30-Jan-1998 |
| 60/055,726 | 18-Aug-1997 | 60/073,162 | 30-Jan-1998 |
| 60/056,361 | 18-Aug-1997 | 60/073,161 | 30-Jan-1998 |
| 60/055,946 | 18-Aug-1997 | 60/073,170 | 30-Jan-1998 |
| 60/053,441 | 22-Jul-1997 | 60/074,341 | 09-Feb-1998 |
| 60/053,440 | 22-Jul-1997 | 60/074,141 | 09-Feb-1998 |
| 60/055,683 | 18-Aug-1997 | 60/077,714 | 12-Mar-1998 |
| 60/055,989 | 18-Aug-1997 | 60/077,687 | 12-Mar-1998 |
| 60/053,442 | 22-Jul-1997 | 60/077,696 | 12-Mar-1998 |
| 60/054,209 | 30-Jul-1997 | 60/077,686 | 12-Mar-1998 |
| 60/055,968 | 18-Aug-1997 | 60/078,574 | 19-Mar-1998 |
| 60/055,972 | 18-Aug-1997 | 60/078,566 | 19-Mar-1998 |
| 60/055,969 | 18-Aug-1997 | 60/078,576 | 19-Mar-1998 |
| 60/054,212 | 30-Jul-1997 | 60/078,577 | 19-Mar-1998 |
| 60/054,234 | 30-Jul-1997 | 60/078,581 | 19-Mar-1998 |
| 60/055,986 | 18-Aug-1997 | 60/078,573 | 19-Mar-1998 |
| 60/055,386 | 05-Aug-1997 | 60/078,578 | 19-Mar-1998 |
| 60/055,970 | 18-Aug-1997 | 60/078,563 | 19-Mar-1998 |
| 60/054,807 | 05-Aug-1997 | 60/080,313 | 01-Apr-1998 |
| 60/056,561 | 19-Aug-1997 | 60/080,312 | 01-Apr-1998 |
| 60/054,214 | 30-Jul-1997 | 60/080,314 | 01-Apr-1998 |
| 60/054,218 | 30-Jul-1997 | 60/085,105 | 12-May-1998 |
| 60/054,236 | 30-Jul-1997 | 60/085,180 | 12-May-1998 |
| 60/054,215 | 30-Jul-1997 | 60/085,093 | 12-May-1998 |
| 60/056,543 | 19-Aug-1997 | 60/085,094 | 12-May-1998 |
| 60/056,729 | 19-Aug-1997 | 60/085,928 | 18-May-1998 |
| 60/056,534 | 19-Aug-1997 | 60/085,920 | 18-May-1998 |
| 60/054,217 | 30-Jul-1997 | 60/085,906 | 18-May-1998 |
| 60/054,213 | 30-Jul-1997 | 60/085,927 | 18-May-1998 |
| 60/056,730 | 19-Aug-1997 | 60/085,924 | 18-May-1998 |
| 60/056,727 | 19-Aug-1997 | 60/085,925 | 18-May-1998 |
| 60/054,211 | 30-Jul-1997 | 60/085,921 | 18-May-1998 |
| 60/056,554 | 19-Aug-1997 | 60/085,922 | 18-May-1998 |
| 60/055,309 | 05-Aug-1997 | 60/085,923 | 18-May-1998 |
| 60/056,563 | 19-Aug-1997 | 60/090,112 | 22-Jun-1998 |
| 60/054,798 | 05-Aug-1997 | 60/089,507 | 16-Jun-1998 |
| 60/056,557 | 19-Aug-1997 | 60/089,508 | 16-Jun-1998 |
| 60/055,312 | 05-Aug-1997 | 60/089,510 | 16-Jun-1998 |
| 60/056,371 | 19-Aug-1997 | 60/089,509 | 16-Jun-1998 |
| 60/056,732 | 19-Aug-1997 | 60/090,113 | 22-Jun-1998 |
| 60/055,310 | 05-Aug-1997 | 60/092,956 | 15-Jul-1998 |
| 60/056,556 | 19-Aug-1997 | 60/092,921 | 15-Jul-1998 |
| 60/056,535 | 19-Aug-1997 | 60/092,922 | 15-Jul-1998 |
| 60/056,369 | 19-Aug-1997 | 60/094,657 | 30-Jul-1998 |
| 60/056,555 | 19-Aug-1997 | 60/095,486 | 05-Aug-1998 |
| 60/056,370 | 19-Aug-1997 | 60/096,319 | 12-Aug-1998 |
| 60/054,804 | 05-Aug-1997 | 60/095,455 | 06-Aug-1998 |
| 60/056,731 | 19-Aug-1997 | 60/095,454 | 06-Aug-1998 |
| 60/056,366 | 19-Aug-1997 | 60/097,917 | 25-Aug-1998 |
| 60/054,809 | 05-Aug-1997 | 60/098,634 | 31-Aug-1998 |
| 60/054,806 | 05-Aug-1997 | 60/101,546 | 23-Sep-1998 |
| 60/054,803 | 05-Aug-1997 | 60/102,895 | 02-Oct-1998 |
| 60/056,364 | 19-Aug-1997 | 60/108,207 | 12-Nov-1998 |
| 60/055,311 | 05-Aug-1997 | 60/236,326 | 29-Sep-2000 |
| 60/056,367 | 19-Aug-1997 | US01/01432 | 17-Jan-2001 |
| 60/056,365 | 19-Aug-1997 | US98/04482 | 06-Mar-1998 |
| 60/054,808 | 05-Aug-1997 | 09/148,545 | 04-Sep-1998 |
| 60/056,368 | 19-Aug-1997 | 09/149,476 | 08-Sep-1998 |
| 60/056,726 | 19-Aug-1997 | US98/04493 | 06-Mar-1998 |
| 60/056,728 | 19-Aug-1997 | 60/190,068 | 17-Mar-2000 |
| 60/056,628 | 19-Aug-1997 | US98/04858 | 12-Mar-1998 |
| 60/056,629 | 19-Aug-1997 | 09/152,060 | 11-Sep-1998 |
| 60/056,271 | 29-Aug-1997 | 60/265,583 | 02-Feb-2001 |
| 60/056,247 | 29-Aug-1997 | 09/154,707 | 17-Sep-1998 |
| 60/056,073 | 29-Aug-1997 | US98/05311 | 19-Mar-1998 |
| 60/056,270 | 29-Aug-1997 | US98/06801 | 07-Apr-1998 |
| 60/057,626 | 05-Sep-1997 | 09/166,780 | 06-Oct-1998 |
| 60/057,663 | 05-Sep-1997 | 09/189,144 | 10-Nov-1998 |
| 60/057,669 | 05-Sep-1997 | US98/10868 | 28-May-1998 |
| 60/058,974 | 12-Sep-1997 | 60/184,836 | 24-Feb-2000 |
| 60/058,973 | 12-Sep-1997 | 60/193,170 | 29-Mar-2000 |
| 60/058,667 | 12-Sep-1997 | US98/11422 | 04-Jun-1998 |
| 60/058,666 | 12-Sep-1997 | 09/205,258 | 04-Dec-1998 |
| 60/060,837 | 02-Oct-1997 | US98/12125 | 11-Jun-1998 |
| 60/060,862 | 02-Oct-1997 | 09/209,462 | 11-Dec-1998 |
| 60/060,839 | 02-Oct-1997 | 09/213,365 | 17-Dec-1998 |
| 60/060,866 | 02-Oct-1997 | US98/13608 | 30-Jun-1998 |
| 60/060,843 | 02-Oct-1997 | 60/239,899 | 13-Oct-2000 |
| 60/060,836 | 02-Oct-1997 | US98/13684 | 07-Jul-1998 |
| 60/060,874 | 02-Oct-1997 | 60/180,909 | 08-Feb-2000 |
| 60/060,838 | 02-Oct-1997 | US98/14613 | 15-Jul-1998 |
| 60/060,884 | 02-Oct-1997 | 09/229,982 | 14-Jan-1999 |
| 60/060,833 | 02-Oct-1997 | US98/15949 | 29-Jul-1998 |
| 60/060,880 | 02-Oct-1997 | 09/236,557 | 26-Jan-1999 |
| 60/061,529 | 09-Oct-1997 | 09/666,984 | 21-Sep-2000 |
| 60/071,498 | 09-Oct-1997 | 2,298,852 | 29-Jul-1998 |
| 60/061,463 | 09-Oct-1997 | 60/238,291 | 06-Oct-2000 |
| 60/061,536 | 09-Oct-1997 | US98/16235 | 04-Aug-1998 |
| 60/061,527 | 09-Oct-1997 | 09/244,112 | 04-Feb-1999 |
| 60/061,532 | 09-Oct-1997 | 09/251,329 | 17-Feb-1999 |
| 60/063,100 | 24-Oct-1997 | US98/17044 | 18-Aug-1998 |
| 60/062,784 | 24-Oct-1997 | 09/716,128 | 17-Nov-2000 |
| 60/063,148 | 24-Oct-1997 | 09/729,835 | 06-Dec-2000 |
| 60/063,387 | 24-Oct-1997 | US98/17709 | 27-Aug-1998 |
| 60/063,386 | 24-Oct-1997 | 09/257,179 | 25-Feb-1999 |
| 60/063,089 | 24-Oct-1997 | US98/18360 | 03-Sep-1998 |
| 60/063,091 | 24-Oct-1997 | 60/262,066 | 18-Jan-2001 |
| 60/063,090 | 24-Oct-1997 | 09/722,329 | 28-Nov-2000 |
| 60/063,092 | 24-Oct-1997 | 09/262,109 | 04-Mar-1999 |
| 60/063,111 | 24-Oct-1997 | US98/20775 | 01-Oct-1998 |
| 60/063,109 | 24-Oct-1997 | 09/281,976 | 31-Mar-1999 |
| 60/063,110 | 24-Oct-1997 | 09/288,143 | 08-Apr-1999 |
| 60/063,101 | 24-Oct-1997 | 60/244,591 | 01-Nov-2000 |
| 60/063,098 | 24-Oct-1997 | US98/21142 | 08-Oct-1998 |
| 60/063,097 | 24-Oct-1997 | US98/22376 | 23-Oct-1998 |
| 60/074,037 | 09-Feb-1998 | 09/296,622 | 23-Apr-1999 |
| 60/074,157 | 09-Feb-1998 | 60/239,893 | 13-Oct-2000 |
| 60/074,118 | 09-Feb-1998 | 09/305,736 | 05-May-1999 |
| 60/076,053 | 26-Feb-1998 | US98/23435 | 04-Nov-1998 |
| 60/076,057 | 26-Feb-1998 | US98/27059 | 17-Dec-1998 |
| 60/076,054 | 26-Feb-1998 | 09/334,595 | 17-Jun-1999 |
| 60/076,052 | 26-Feb-1998 | 09/348,457 | 07-Jul-1999 |
| 60/076,051 | 26-Feb-1998 | 09/739,907 | 20-Dec-2000 |
| 60/113,006 | 18-Dec-1998 | US99/00108 | 06-Jan-1999 |
| 60/112,809 | 17-Dec-1998 | 60/232,150 | 12-Sep-2000 |
| 60/116,330 | 19-Jan-1999 | 09/363,044 | 29-Jul-1999 |
| 60/119,468 | 10-Feb-1999 | US99/01621 | 27-Jan-1999 |
| 60/125,055 | 18-Mar-1999 | US99/02293 | 04-Feb-1999 |
| 60/128,693 | 09-Apr-1999 | 09/369,247 | 05-Aug-1999 |
| 60/130,991 | 26-Apr-1999 | 09/716,129 | 17-Nov-2000 |
| 60/137,725 | 07-Jun-1999 | US99/03939 | 24-Feb-1999 |
| 60/145,220 | 23-Jul-1999 | US99/05721 | 11-Mar-1999 |
| 60/149,182 | 17-Aug-1999 | 09/393,022 | 09-Sep-1999 |
| 60/152,317 | 03-Sep-1999 | 09/397,945 | 17-Sep-1999 |
| 60/152,315 | 03-Sep-1999 | 60/231,846 | 11-Sep-2000 |
| 60/155,709 | 24-Sep-1999 | US99/09847 | 06-May-1999 |
| 60/163,085 | 02-Nov-1999 | 09/437,658 | 10-Nov-1999 |
| 60/172,411 | 17-Dec-1999 | US99/13418 | 15-Jun-1999 |
| 60/134,068 | 13-May-1999 | 60/263,681 | 24-Jan-2001 |
| US00/12788 | 11-May-2000 | 60/263,230 | 23-Jan-2001 |
| 60/167,061 | 23-Nov-1999 | 09/461,325 | 14-Dec-1999 |
| 60/124,146 | 12-Mar-1999 | US99/15849 | 14-Jul-1999 |
| US00/06043 | 09-Mar-2000 | 60/234,925 | 25-Sep-2000 |
| 60/124,093 | 12-Mar-1999 | US01/00911 | 12-Jan-2001 |
| US00/06012 | 09-Mar-2000 | 09/482,273 | 13-Jan-2000 |
| 60/166,989 | 23-Nov-1999 | 09/489,847 | 24-Jan-2000 |
| US00/06058 | 09-Mar-2000 | US99/17130 | 29-Jul-1999 |
| 60/124,145 | 12-Mar-1999 | US99/19330 | 24-Aug-1999 |
| 60/168,654 | 03-Dec-1999 | 09/511,554 | 23-Feb-2000 |
| 60/124,099 | 12-Mar-1999 | 09/531,119 | 20-Mar-2000 |
| US00/06044 | 09-Mar-2000 | US99/22012 | 22-Sep-1999 |
| 60/168,661 | 03-Dec-1999 | US99/26409 | 09-Nov-1999 |
| 60/124,096 | 12-Mar-1999 | 09/565,391 | 05-May-2000 |
| 60/168,622 | 03-Dec-1999 | US99/29950 | 16-Dec-1999 |
| US00/06059 | 09-Mar-2000 | 09/591,316 | 09-Jun-2000 |
| US00/06042 | 09-Mar-2000 | 09/618,150 | 17-Jul-2000 |
| 60/124,143 | 12-Mar-1999 | US00/00903 | 18-Jan-2000 |
| 60/168,663 | 03-Dec-1999 | 09/628,508 | 28-Jul-2000 |
| 60/124,095 | 12-Mar-1999 | US00/03062 | 08-Feb-2000 |
| US00/06014 | 09-Mar-2000 | US00/06783 | 16-Mar-2000 |
| 60/138,598 | 11-Jun-1999 | 09/661,453 | 13-Sep-2000 |
| 60/168,665 | 03-Dec-1999 | 09/684,524 | 10-Oct-2000 |
| US00/06013 | 09-Mar-2000 | US00/08979 | 06-Apr-2000 |
| 60/138,626 | 11-Jun-1999 | 09/726,643 | 01-Dec-2000 |
| 60/168,662 | 03-Dec-1999 | US00/15187 | 02-Jun-2000 |
| 60/125,360 | 19-Mar-1999 | 09/756,168 | 09-Jan-2001 |
| US00/06049 | 09-Mar-2000 | US00/19735 | 20-Jul-2000 |
| 60/168,667 | 03-Dec-1999 | US00/22325 | 16-Aug-2000 |
| 60/138,574 | 11-Jun-1999 | US00/24008 | 31-Aug-2000 |
| 60/124,144 | 12-Mar-1999 | US00/26013 | 22-Sep-2000 |
| 60/124,142 | 12-Mar-1999 | US00/28664 | 17-Oct-2000 |
| 60/138,597 | 11-Jun-1999 | 60/277,340 | 21-Mar-01 |
| 60/168,666 | 03-Dec-1999 | 09/781,417 | 13-Feb-01 |
| US00/06057 | 09-Mar-2000 | 09/789,561 | 22-Feb-01 |
| 60/125,359 | 19-Mar-1999 | 09/800,729 | 08-Mar-01 |
| 60/168,664 | 03-Dec-1999 | 09/756,168 | 09-Jan-01 |

[1294] Furthermore, the contents and sequence listings of application Ser. No. 09/833,245, filed Apr. 12, 2001; Ser. No. 09/091,873 filed Jun. 25, 1998; 60/229,358 filed on Apr. 12, 2000; 60/199,384 filed on Apr. 25, 2000 and 60/256,931 filed on Dec. 21, 2000 are hereby incorporation by reference in their entirety.

LENGTHY TABLES
The patent application contains a lengthy table section. A copy of the table is available in electronic form from the USPTO web site (http://seqdata.uspto.gov/?pageRequest=docDetail&DocID=US20100286048A1). An electronic copy of the table will also be available from the USPTO upon request and payment of the fee set forth in 37 CFR 1.19(b)(3).

The application's sequence listing, which the Patent Office published only in electronic form, follows.

SEQUENCE LISTING (2281 sequences)

SEQ ID NO: 1 - DNA, 23 bp, Artificial Sequence
  primer_bind: primer useful to clone human growth hormone cDNA
cccaagaattcccttatccaggc

SEQ ID NO: 2 - DNA, 33 bp, Artificial Sequence
  primer_bind: primer useful to clone human growth hormone cDNA
gggaagcttagaagccacaggatccctccacag

SEQ ID NO: 3 - DNA, 16 bp, Artificial Sequence
  misc_structure: synthetic oligonucleotide used to join DNA fragments with non-cohesive ends.
gataaagattcccaac

SEQ ID NO: 4 - DNA, 17 bp, Artificial Sequence
  misc_structure: synthetic oligonucleotide used to join DNA fragments with non-cohesive ends.
aattgttgggaatcttt

SEQ ID NO: 5 - DNA, 17 bp, Artificial Sequence
  misc_structure: synthetic oligonucleotide used to join DNA fragments with non-cohesive ends.
ttaggcttattcccaac

SEQ ID NO: 6 - DNA, 18 bp, Artificial Sequence
  misc_structure: synthetic oligonucleotide used to join DNA fragments with non-cohesive ends.
aattgttgggaataagcc

SEQ ID NO: 7 - protein, 24 aa, Artificial Sequence
  SITE 1)..(19): invertase leader sequence
  SITE 20)..(24): first 5 amino acids of mature human serum albumin
MLLQAFLFLLAGFAAKISADAHKS

SEQ ID NO: 8 - DNA, 21 bp, Artificial Sequence
  misc_structure: synthetic oligonucleotide used to join DNA fragments with non-cohesive ends.
gagatgcacacctgagtgagg

SEQ ID NO: 9 - DNA, 27 bp, Artificial Sequence
  misc_structure: synthetic oligonucleotide used to join DNA fragments with non-cohesive ends.
gatcctgtggcttcgatgcacacaaga

SEQ ID NO: 10 - DNA, 24 bp, Artificial Sequence
  misc_structure: synthetic oligonucleotide used to join DNA fragments with non-cohesive ends.
ctcttgtgtgcatcgaagccacag

SEQ ID NO: 11 - DNA, 30 bp, Artificial Sequence
  misc_structure: synthetic oligonucleotide used to join DNA fragments with non-cohesive ends.
tgtggaagagcctcagaatttattcccaac

SEQ ID NO: 12 - DNA, 31 bp, Artificial Sequence
  misc_structure: synthetic oligonucleotide used to join DNA fragments with non-cohesive ends.
aattgttgggaataaattctgaggctcttcc

SEQ ID NO: 13 - DNA, 47 bp, Artificial Sequence
  misc_structure: synthetic oligonucleotide used to join DNA fragments with non-cohesive ends.
ttaggcttaggtggcggtggatccggcggtggtggatctttcccaac

SEQ ID NO: 14 - DNA, 48 bp, Artificial Sequence
  misc_structure: synthetic oligonucleotide used to join DNA fragments with non-cohesive ends.
aattgttgggaaagatccaccaccgccggatccaccgccacctaagcc

SEQ ID NO: 15 - DNA, 62 bp, Artificial Sequence
  misc_structure: synthetic oligonucleotide used to join DNA fragments with non-cohesive ends.
ttaggcttaggcggtggtggatctggtggcggcggatctggtggcggtggatccttcccaac

SEQ ID NO: 16 - DNA, 63 bp, Artificial Sequence
  misc_structure: synthetic oligonucleotide used to join DNA fragments with non-cohesive ends.
aattgttgggaaggatccaccgccaccagatccgccgccaccagatccaccaccgcctaagcc

SEQ ID NO: 17 - DNA, 1782 bp, Homo sapiens
  CDS (1)..(1755)
gatgcacacaagagtgaggttgctcatcggtttaaagatttgggagaagaaaatttcaaagccttggtgttgattgcctttgctcagtatcttcagcagtgtccatttgaagatcatgtaaaattagtgaatgaagtaactgaatttgcaaaaacatgtgttgctgatgagtcagctgaaaattgtgacaaatcacttcataccctttttggagacaaattatgcacagttgcaactcttcgtgaaacctatggtgaaatggctgactgctgtgcaaaacaagaacctgagagaaatgaatgcttcttgcaacacaaagatgacaacccaaacctcccccgattggtgagaccagaggttgatgtgatgtgcactgcttttcatgacaatgaagagacatttttgaaaaaatacttatatgaaattgccagaagacatccttacttttatgccccggaactccttttctttgctaaaaggtataaagctgcttttacagaatgttgccaagctgctgataaagctgcctgcctgttgccaaagctcgatgaacttcgggatgaagggaaggcttcgtctgccaaacagagactcaaatgtgccagtctccaaaaatttggagaaagagctttcaaagcatgggcagtggctcgcctgagccagagatttcccaaagctgagtttgcagaagtttccaagttagtgacagatcttaccaaagtccacacggaatgctgccatggagatctgcttgaatgtgctgatgacagggcggaccttgccaagtatatctgtgaaaatcaggattcgatctccagtaaactgaaggaatgctgtgaaaaacctctgttggaaaaatcccactgcattgccgaagtggaaaatgatgagatgcctgctgacttgccttcattagctgctgattttgttgaaagtaaggatgtttgcaaaaactatgctgaggcaaaggatgtcttcctgggcatgtttttgtatgaatatgcaagaaggcatcctgattactctgtcgtgctgctgctgagacttgccaagacatatgaaaccactctagagaagtgctgtgccgctgcagatcctcatgaatgctatgccaaagtgttcgatgaatttaaacctcttgtggaagagcctcagaatttaatcaaacaaaactgtgagctttttgagcagcttggagagtacaaattccagaatgcgctattagttcgttacaccaagaaagtaccccaagtgtcaactccaactcttgtagaggtctcaagaaacctaggaaaagtgggcagcaaatgttgtaaacatcctgaagcaaaaagaatgccctgtgcagaagactatctatccgtggtcctgaaccagttatgtgtgttgcatgagaaaacgccagtaagtgacagagtcacaaaatgctgcacagagtccttggtgaacaggcgaccatgcttttcagctctggaagtcgatgaaacatacgttcccaaagagtttaatgctgaaacattcaccttccatgcagatatatgcacactttctgagaaggagagacaaatcaagaaacaaactgcacttgttgagcttgtgaaacacaagcccaaggcaacaaaagagcaactgaaagctgttatggatgatttcgcagcttttgtagagaagtgctgcaaggctgacgataaggagacctgctttgccgaggagggtaaaaaacttgttgctgcaagtcaagctgccttaggcttataacatctacatttaaaagcatctcag

SEQ ID NO: 18 - protein, 585 aa, Homo Sapiens [sequence omitted]

SEQ ID NO: 19 - DNA, 58 bp, Artificial Sequence
  primer_bind: primer used to generate XhoI and ClaI site in pPPC0006
gcctcgagaaaagagatgcacacaagagtgaggttgctcatcgatttaaagatttggg

SEQ ID NO: 20 - DNA, 59 bp, Artificial Sequence
  primer_bind: primer used in generation XhoI and ClaI site in pPPC0006
aatcgatgagcaacctcactcttgtgtgcatctcttttctcgaggctcctggaataagc

SEQ ID NO: 21 - DNA, 24 bp, Artificial Sequence
  primer_bind: primer used in generation XhoI and ClaI site in pPPC0006
tacaaacttaagagtccaattagc

SEQ ID NO: 22 - DNA, 29 bp, Artificial Sequence
  primer_bind: primer used in generation XhoI and ClaI site in pPPC0006
cacttctctagagtggtttcatatgtctt

SEQ ID NO: 23 - DNA, 60 bp, Artificial Sequence
  Misc_Structure: Synthetic oligonucleotide used to alter restriction sites in pPPC0007
aagctgccttaggcttataataaggcgcgccggccggccgtttaaactaagcttaattct

SEQ ID NO: 24 - DNA, 60 bp, Artificial Sequence
  Misc_Structure: Synthetic oligonucleotide used to alter restriction sites in pPPC0007
agaattaagcttagtttaaacggccggccggcgcgccttattataagcctaaggcagctt

SEQ ID NO: 25 - DNA, 32 bp, Artificial Sequence
  primer_bind: forward primer useful for generation of albumin fusion protein in which the albumin moiety is N-terminal of the Therapeutic Protein
  Misc_Structure (18): n equals a, t, g, or c
  Misc_Structure (19): n equals a, t, g, or c
  Misc_Structure (20): n equals a, t, g, or c
  Misc_Structure (21): n equals a, t, g, or c
  Misc_Structure (22): n equals a, t, g, or c
  Misc_Structure (23): n equals a, t, g, or c
  Misc_Structure (24): n equals a, t, g, or c
  Misc_Structure (25): n equals a, t, g, or c
  Misc_Structure (26): n equals a, t, g, or c
  Misc_Structure (27): n equals a, t, g, or c
  Misc_Structure (28): n equals a, t, g, or c
  Misc_Structure (29): n equals a, t, g, or c
  Misc_Structure (30): n equals a, t, g, or c
  Misc_Structure (31): n equals a, t, g, or c
  Misc_Structure (32): n equals a, t, g, or c
aagctgccttaggcttannnnnnnnnnnnnnn

SEQ ID NO: 26 - DNA, 51 bp, Artificial Sequence
  primer_bind: reverse primer useful for generation of albumin fusion protein in which the albumin moiety is N-terminal of the Therapeutic Protein
  Misc_Structure (37): n equals a, t, g, or c
  Misc_Structure (38): n equals a, t, g, or c
  Misc_Structure (39): n equals a, t, g, or c
  Misc_Structure (40): n equals a, t, g, or c
  Misc_Structure (41): n equals a, t, g, or c
  Misc_Structure (42): n equals a, t, g, or c
  Misc_Structure (43): n equals a, t, g, or c
  Misc_Structure (44): n equals a, t, g, or c
  Misc_Structure (45): n equals a, t, g, or c
  Misc_Structure (46): n equals a, t, g, or c
  Misc_Structure (47): n equals a, t, g, or c
  Misc_Structure (48): n equals a, t, g, or c
  Misc_Structure (49): n equals a, t, g, or c
  Misc_Structure (50): n equals a, t, g, or c
  Misc_Structure (51): n equals a, t, g, or c
gcgcgcgtttaaacggccggccggcgcgccttattannnnnnnnnnnnnnn

SEQ ID NO: 27 - DNA, 33 bp, Artificial Sequence
  forward primer useful for generation of albumin fusion protein in which the albumin moiety is c-terminal of the Therapeutic Protein
  Misc_Structure (19): n equals a, t, g, or c
  Misc_Structure (20): n equals a, t, g, or c
  Misc_Structure (21): n equals a, t, g, or c
  Misc_Structure (22): n equals a, t, g, or c
  Misc_Structure (23): n equals a, t, g, or c
  Misc_Structure (24): n equals a, t, g, or c
  Misc_Structure (25): n equals a, t, g, or c
  Misc_Structure (26): n equals a, t, g, or c
  Misc_Structure (27): n equals a, t, g, or c
  Misc_Structure (28): n equals a, t, g, or c
  Misc_Structure (29): n equals a, t, g, or c
  Misc_Structure (30): n equals a, t, g, or c
  Misc_Structure (31): n equals a, t, g, or c
  Misc_Structure (32): n equals a, t, g, or c
  Misc_Structure (33): n equals a, t, g, or c
aggagcgtcgacaaaagannnnnnnnnnnnnnn

SEQ ID NO: 28 - DNA, 52 bp, Artificial Sequence
  primer_bind: reverse primer useful for generation of albumin fusion protein in which the albumin moiety is c-terminal of the Therapeutic Protein
  Misc_Structure (38): n equals a, t, g, or c
  Misc_Structure (39): n equals a, t, g, or c
  Misc_Structure (40): n equals a, t, g, or c
  Misc_Structure (41): n equals a, t, g, or c
  Misc_Structure (42): n equals a, t, g, or c
  Misc_Structure (43): n equals a, t, g, or c
  Misc_Structure (44): n equals a, t, g, or c
  Misc_Structure (45): n equals a, t, g, or c
  Misc_Structure (46): n equals a, t, g, or c
  Misc_Structure (47): n equals a, t, g, or c
  Misc_Structure (48): n equals a, t, g, or c
  Misc_Structure (49): n equals a, t, g, or c
  Misc_Structure (50): n equals a, t, g, or c
  Misc_Structure (51): n equals a, t, g, or c
  Misc_Structure (52): n equals a, t, g, or c
ctttaaatcgatgagcaacctcactcttgtgtgcatcnnnnnnnnnnnnnnn

SEQ ID NO: 29 - protein, 24 aa, Artificial Sequence
  signal: signal peptide of natural human serum albumin protein
MKWVSFISLLFLFSSAYSRSLDKR

SEQ ID NO: 30 - DNA, 114 bp, Artificial Sequence
  primer_bind: forward primer useful for generation of PC4:HSA albumin fusion VECTOR
  misc_feature (5)..(10): BamHI retsriction site
  misc_feature (11)..(16): Hind III retsriction site
  misc_feature (17)..(27): Kozak sequence
  misc_feature (25)..(97): cds natural signal sequence of human serum albumin
  misc_feature (75)..(81): XhoI restriction site
  misc_feature (98)..(114): cds first six amino acids of human serum albumin
tcagggatccaagcttccgccaccatgaagtgggtaacctttatttcccttctttttctctttagctcggcttactcgaggggtgtgtttcgtcgagatgcacacaagagtgag

SEQ ID NO: 31 - DNA, 43 bp, Artificial Sequence
  primer_bind: reverse primer useful for generation of PC4:HSA albumin fusion VECTOR
  misc_feature (6)..(11): Asp718 restriction site
  misc_feature (12)..(17): EcoRI restriction site
  misc_feature (15)..(17): reverse complement of stop codon
  misc_feature (18)..(25): AscI restriction site
  misc_feature (18)..(43): reverse complement of DNA sequence encoding last 9 amino acids
gcagcggtaccgaattcggcgcgccttataagcctaaggcagc

SEQ ID NO: 32 - DNA, 46 bp, Artificial Sequence
  primer_bind: forward primer useful for inserting Therapeutic protein into pC4:HSA vector
  Misc_Structure (29): n equals a, t, g, or c
  Misc_Structure (30): n equals a, t, g, or c
  Misc_Structure (31): n equals a, t, g, or c
  Misc_Structure (32): n equals a, t, g, or c
  Misc_Structure (33): n equals a, t, g, or c
  Misc_Structure (34): n equals a, t, g, or c
  Misc_Structure (35): n equals a, t, g, or c
  Misc_Structure (36): n equals a, t, g, or c
  Misc_Structure (37): n equals a, t, g, or c
  Misc_Structure (38): n equals a, t, g, or c
  Misc_Structure (39): n equals a, t, g, or c
  Misc_Structure (40): n equals a, t, g, or c
  Misc_Structure (41): n equals a, t, g, or c
  Misc_Structure (42): n equals a, t, g, or c
  Misc_Structure (43): n equals a, t, g, or c
  Misc_Structure (44): n equals a, t, g, or c
  Misc_Structure (45): n equals a, t, g, or c
  Misc_Structure (46): n equals a, t, g, or c
ccgccgctcgaggggtgtgtttcgtcgannnnnnnnnnnnnnnnnn

SEQ ID NO: 33 - DNA, 55 bp, Artificial Sequence
  primer_bind: reverse primer useful for inserting Therapeutic protein into pC4:HSA vector
  Misc_Structure (38): n equals a, t, g, or c
  Misc_Structure (39): n equals a, t, g, or c
  Misc_Structure (40): n equals a, t, g, or c
  Misc_Structure (41): n equals a, t, g, or c
  Misc_Structure (42): n equals a, t, g, or c
  Misc_Structure (43): n equals a, t, g, or c
  Misc_Structure (44): n equals a, t, g, or c
  Misc_Structure (45): n equals a, t, g, or c
  Misc_Structure (46): n equals a, t, g, or c
  Misc_Structure (47): n equals a, t, g, or c
  Misc_Structure (48): n equals a, t, g, or c
  Misc_Structure (49): n equals a, t, g, or c
  Misc_Structure (50): n equals a, t, g, or c
  Misc_Structure (51): n equals a, t, g, or c
  Misc_Structure (52): n equals a, t, g, or c
  Misc_Structure (53): n equals a, t, g, or c
  Misc_Structure (54): n equals a, t, g, or c
  Misc_Structure (55): n equals a, t, g, or c
agtcccatcgatgagcaacctcactcttgtgtgcatcnnnnnnnnnnnnnnnnnn

SEQ ID NO: 34 - protein, 17 aa, Artificial Sequence
  signal: Stanniocalcin signal peptide
MLQNSAVLLLLVISASA

SEQ ID NO: 35 - protein, 22 aa, Artificial Sequence
  signal: Synthetic signal peptide
MPTWAWWLFLVLLLALWAPARG

SEQ ID NO: 36 - DNA, 23 bp, Artificial Sequence
  primer_bind: Degenerate VH forward primer useful for amplifying human VH domains
caggtgcagctggtgcagtctgg

SEQ ID NO: 37 - DNA, 23 bp, Artificial Sequence
  primer_bind: Degenerate VH forward primer useful for amplifying human VH domains
caggtcaacttaagggagtctgg

SEQ ID NO: 38 - DNA, 23 bp, Artificial Sequence
  primer_bind: Degenerate VH forward primer useful for amplifying human VH domains
gaggtgcagctggtggagtctgg

SEQ ID NO: 39 - DNA, 23 bp, Artificial Sequence
  primer_bind: Degenerate VH forward primer useful for amplifying human VH domains
caggtgcagctgcaggagtcggg

SEQ ID NO: 40 - DNA, 23 bp, Artificial Sequence
  primer_bind: Degenerate VH forward primer useful for amplifying human VH domains
gaggtgcagctgttgcagtctgc

SEQ ID NO: 41 - DNA, 23 bp, Artificial Sequence
  primer_bind: Degenerate VH forward primer useful for amplifying human VH domains
caggtacagctgcagcagtcagg

SEQ ID NO: 42 - DNA, 24 bp, Artificial Sequence
  primer_bind: Degenerate JH reverse primer useful for amplifying human VH domains
tgaggagacggtgaccagggtgcc

SEQ ID NO: 43 - DNA, 24 bp, Artificial Sequence
  primer_bind: Degenerate JH reverse primer useful for amplifying human VH domains
tgaagagacggtgaccattgtccc

SEQ ID NO: 44 - DNA, 24 bp, Artificial Sequence
  primer_bind: Degenerate JH reverse primer useful for amplifying human VH domains
tgaggagacggtgaccagggttcc

SEQ ID NO: 45 - DNA, 24 bp, Artificial Sequence
  primer_bind: Degenerate JH reverse primer useful for amplifying human VH domains
tgaggagacggtgaccgtggtccc

SEQ ID NO: 46 - DNA, 23 bp, Artificial Sequence
  primer_bind: Degenerate Vkappa forward primer useful for amplifying human VL domains
gacatccagatgacccagtctcc

SEQ ID NO: 47 - DNA, 23 bp, Artificial Sequence
  primer_bind: Degenerate Vkappa forward primer useful for amplifying human VL domains
gatgttgtgatgactcagtctcc

SEQ ID NO: 48 - DNA, 23 bp, Artificial Sequence
  primer_bind: Degenerate Vkappa forward primer useful for amplifying human VL domains
gatattgtgatgactcagtctcc

SEQ ID NO: 49 - DNA, 23 bp, Artificial Sequence
  primer_bind: Degenerate Vkappa forward primer useful for amplifying human VL domains
gaaattgtgttgacgcagtctcc

SEQ ID NO: 50 - DNA, 23 bp, Artificial Sequence
  primer_bind: Degenerate Vkappa forward primer useful for amplifying human VL domains
gacatcgtgatgacccagtctcc

SEQ ID NO: 51 - DNA, 23 bp, Artificial Sequence
  primer_bind: Degenerate Vkappa forward primer useful for amplifying human VL domains
gaaacgacactcacgcagtctcc

SEQ ID NO: 52 - DNA, 23 bp, Artificial Sequence
  primer_bind: Degenerate Vkappa forward primer useful for amplifying human VL domains
gaaattgtgctgactcagtctcc

SEQ ID NO: 53 - DNA, 23 bp, Artificial Sequence
  primer_bind: Degenerate Vlambda forward primer useful for amplifying human VL domains
cagtctgtgttgacgcagccgcc

SEQ ID NO: 54 - DNA, 23 bp, Artificial Sequence
  primer_bind: Degenerate Vlambda forward primer useful for amplifying human VL domains
cagtctgccctgactcagcctgc

SEQ ID NO: 55 - DNA, 23 bp, Artificial Sequence
  primer_bind: Degenerate Vlambda forward primer useful for amplifying human VL domains
tcctatgtgctgactcagccacc

SEQ ID NO: 56 - DNA, 23 bp, Artificial Sequence
  primer_bind: Degenerate Vlambda forward primer useful for amplifying human VL domains
tcttctgagctgactcaggaccc

SEQ ID NO: 57 - DNA, 23 bp, Artificial Sequence
  primer_bind: Degenerate Vlambda forward primer useful for amplifying human VL domains
cacgttatactgactcaaccgcc

SEQ ID NO: 58 - DNA, 23 bp, Artificial Sequence
  primer_bind: Degenerate Vlambda forward primer useful for amplifying human VL domains
caggctgtgctcactcagccgtc

SEQ ID NO: 59 - DNA, 23 bp, Artificial Sequence
  primer_bind: Degenerate Vlambda forward primer useful for amplifying human VL domains
aattttatgctgactcagcccca

SEQ ID NO: 60 - DNA, 24 bp, Artificial Sequence
  primer_bind: Degenerate Jkappa reverse primer useful for amplifying human VL domains
acgtttgatttccaccttggtccc

SEQ ID NO: 61 - DNA, 24 bp, Artificial Sequence
  primer_bind: Degenerate Jkappa reverse primer useful for amplifying human VL domains
acgtttgatctccagcttggtccc

SEQ ID NO: 62 - DNA, 24 bp, Artificial Sequence
  primer_bind: Degenerate Jkappa reverse primer useful for amplifying human VL domains
acgtttgatatccactttggtccc

SEQ ID NO: 63 - DNA, 24 bp, Artificial Sequence
  primer_bind: Degenerate Jkappa reverse primer useful for amplifying human VL domains
acgtttgatctccaccttggtccc

SEQ ID NO: 64 - DNA, 24 bp, Artificial Sequence
  primer_bind: Degenerate Jkappa reverse primer useful for amplifying human VL domains
acgtttaatctccagtcgtgtccc

SEQ ID NO: 65 - DNA, 23 bp, Artificial Sequence
  primer_bind: Degenerate Jlambda reverse primer useful for amplifying human VL domains
cagtctgtgttgacgcagccgcc

SEQ ID NO: 66 - DNA, 23 bp, Artificial Sequence
  primer_bind: Degenerate Jlambda reverse primer useful for amplifying human VL domains
cagtctgccctgactcagcctgc

SEQ ID NO: 67 - DNA, 23 bp, Artificial Sequence
  primer_bind: Degenerate Jlambda reverse primer useful for amplifying human VL domains
tcctatgtgctgactcagccacc

SEQ ID NO: 68 - DNA, 23 bp, Artificial Sequence
  primer_bind: Degenerate Jlambda reverse primer useful for amplifying human VL domains
tcttctgagctgactcaggaccc

SEQ ID NO: 69 - DNA, 23 bp, Artificial Sequence
  primer_bind: Degenerate Jlambda reverse primer useful for amplifying human VL domains
cacgttatactgactcaaccgcc

SEQ ID NO: 70 - DNA, 23 bp, Artificial Sequence
  primer_bind: Degenerate Jlambda reverse primer useful for amplifying human VL domains
caggctgtgctcactcagccgtc

SEQ ID NO: 71 - DNA, 23 bp, Artificial Sequence
  primer_bind: Degenerate Jlambda reverse primer useful for amplifying human VL domains
aattttatgctgactcagcccca

SEQ ID NO: 72 - protein, 15 aa, Artificial Sequence
  turn: Linker peptide that may be used to join VH and VL domains in an scFv.
GGGGSGGGGSGGGGS

SEQ ID NO: 73 - protein, 101 aa, Homo sapiens [sequence omitted]

SEQ ID NO: 74 - protein, 58 aa, Homo sapiens
  SITE (24): Xaa equals any of the naturally occurring L-amino acids
RPSLPKCAALVHVPNGPSPHAPPXSGVGAPSEVSESLKCSFVRPLCSDSPGQATSNPL

SEQ ID NO: 75 - protein, 119 aa, Homo sapiens
DLDLMESGVSTHNMSSWTLGIHCEQAGWGLPAQIGAILFCILFQGVLNTLKQVEAPAPDWELLERPPCVCVVLSWSHIESGWGSSTRQSPSNSQVLAPSGKADTLSWRRPRKSGLRVAA

SEQ ID NO: 76 - protein, 90 aa, Homo sapiens
  SITE (5): Xaa equals any of the naturally occurring L-amino acids
VTCQXVLPSPVYLCNYFCKHCILCGRHLLAPSLGFSLSSRPACTSLGCSGVSAPHSRPGCQAQPAGARDPAACPKHLFLGDGVGAAPQEV

SEQ ID NO: 77 - protein, 70 aa, Homo sapiens
  SITE (29): Xaa equals any of the naturally occurring L-amino acids
  SITE (34): Xaa equals any of the naturally occurring L-amino acids
  SITE (37): Xaa equals any of the naturally occurring L-amino acids
MDPAAVALLALSLPCALVGVQWEQAPWGXWRLSXSAXTPETPSWRLCPLRDYPKPGQRSGGDRGSHIRSL

SEQ ID NO: 78 - protein, 194 aa, Homo sapiens
  SITE (3): Xaa equals any of the naturally occurring L-amino acids
  SITE (17): Xaa equals any of the naturally occurring L-amino acids
  SITE (33): Xaa equals any of the naturally occurring L-amino acids
QWXGQGSLCPWYCCPGXVSAVTLLPSWWLLRPXFVLLFLPKCLSSPSCIKYPCCATNYLELGDFTTTACQRPAVDEGLGGMAGPAQGSLAEVGAEAARHWRLGLSHTPWLLGGCILLSSLSSRGCTLGCRPPVSLTGYSWGSLRSWRCPQPPSPRLPPPHTLRPQRFVRVHEILELPGCSFCNIFNICNPVKYQ

SEQ ID NO: 79 - protein, 103 aa, Homo sapiens
MDPAAVALLALSLPCALVGVQWEQAPWGPWRLSLLSPHPRDPIVAPVSTQGLSQAWPEVGRGQREPHRSLYQPLSYHRVGALPSHRVSGLWAPPSCTGPRGHF

SEQ ID NO: 80 - protein, 477 aa, Homo sapiens [sequence omitted]

SEQ ID NO: 81 - protein, 445 aa, Homo sapiens
MAAPTPARPVLTHLLVALFGMGSWAAVNGIWVELPVVVKELPEGWSLPSYVSVLVALGNLGLLVVTLWRRLAPGKDEQVPIRVVQVLGMVGTALLASLWHHVAPVAGQLHSVAFLALAFVLALACCAPNVTFLPFLSHLPPRFLRSFFLGQGLSALLPCVLALVQGVGRLECPPAPINGTPGPPLDFLERFPASTFFWALTALLVASAAAFQGLLLLLPPPPSVPTGELGSGLQVGAPGAEEEVEESSPLQEPPSQAAGTTPGPDPKAYQLLSARSACLLGLLAATNALTNGVLPAVQSFSCLPYGRLAYHLAVVLGSAANPLACFLAMGVLCRSLAGLGGLSLLGVFCGGYLMALAVLSPCPPLVGTSAGVVLVVLSWVLCLGVFSYVKVAASSLLHGGGRPALLAAGVAIQVGSLLGAVAMFPPTSIYHVFHSRKDCADPCDS

SEQ ID NO: 82 - protein, 264 aa, Homo sapiens
  SITE (196): Xaa equals any of the naturally occurring L-amino acids
  SITE (224): Xaa equals any of the naturally occurring L-amino acids
  SITE (233): Xaa equals any of the naturally occurring L-amino acids
MLRLFETFLETAPQLTLVLAIMLQSGRAEYYQWVGICTSFLGISWALLDYHRALRTCLPSKPLLGLGSSVIYFLWNLLLLWPRVLAVALFSALFPSYVALHFLGLWLVLLLWVWLQGTDFMPDPSSEWLYRVTVATILYFSWFNVAEGRTRGRAIIHFAFLLSDSILLVATWVTHSSWLPSGIPLQLWLPVGCGCXFLGLALRLVYYHWLHPSCCWKPDPDQVXGARSLLSPXGYQLPQNRRMTHLAQKFFPKAKDEAASPVKG

SEQ ID NO: 83 - protein, 115 aa, Homo sapiens
  SITE (60): Xaa equals any of the naturally occurring L-amino acids
  SITE (73): Xaa equals any of the naturally occurring L-amino acids
  SITE (75): Xaa equals any of the naturally occurring L-amino acids
  SITE (82): Xaa equals any of the naturally occurring L-amino acids
LPYPGLGGHRGCPLEFFLPSPTPFIQFMKQIFAKSSLCARNIILSLQPGTRPATSLASSXTCTNQSRVRSQMXEXRDAQLWXAPVRTSGISVKLAWPLLLLSRGCFSTKSLVSLV

SEQ ID NO: 84 - protein, 264 aa, Homo sapiens
MLRLFETFLETAPQLTLVLAIMLQSGRAEYYQWVGICTSFLGISWALLDYHRALRTCLPSKPLLGLGSSVIYFLWNLLLLWPRVLAVALFSALFPSYVALHFLGLWLVLLLWVWLQGTDFMPDPSSEWLYRVTVATILYFSWFNVAEGRTRGRAIIHFAFLLSDSILLVATWVTHSSWLPSGIPLQLWLPVGCGCFFLGLALRLVYYHWLHPSCCWKPDPDQVDGARSLLSPEGYQLPQNRRMTHLAQKFFPKAKDEAASPVKG

SEQ ID NO: 85 - protein, 57 aa, Homo sapiens
MNVFLSLPLGSSLPPLLFPPSLPSLFFPLPLYLSFSAPSPATTPGFISLPGHIPSSS

SEQ ID NO: 86 - protein, 49 aa, Homo sapiens
  SITE (26): Xaa equals any of the naturally occurring L-amino acids
CHPQQPSCRIPLFVLFISQTSQHLGXIEGAYVEILGAGSPNTSETIPNN

SEQ ID NO: 87 - protein, 52 aa, Homo sapiens
  SITE (50): Xaa equals any of the naturally occurring L-amino acids
KEPTLKYWGRVPPILLKLFQTIEKEGHLPNSFYEASIILILKPGRDTAKXKK

SEQ ID NO: 88 - protein, 155 aa, Homo sapiens [sequence omitted]

SEQ ID NO: 89 - protein, 91 aa, Homo sapiens
  SITE (41): Xaa equals any of the naturally occurring L-amino acids
VWRRCVSWRSIRAQVTFPEDFLSLSSSVQFQVIHVLLDPGXTGISTDLLASFGLEYHSWLGAEAAGLIVIYHKVARKLPRGVRKAAGGGRV

SEQ ID NO: 90 - protein, 21 aa, Homo sapiens
DLHIKLLEHYCLTSCKKVLQL

SEQ ID NO: 91 - protein, 67 aa, Homo sapiens
  SITE (13): Xaa equals any of the naturally occurring L-amino acids
PQSPQRGCYSMLXVLSVSHPQPNKWRCVVPRGPFSHCLASRRGVLQGYSFVCTCRLVGPEFFSHVQE

SEQ ID NO: 92 - protein, 21 aa, Homo sapiens
DLHIKLLEHYCLTSCKKVLQL

SEQ ID NO: 93 - protein, 67 aa, Homo sapiens [sequence omitted]

SEQ ID NO: 94 - protein, 44 aa, Homo sapiens
MLSSILSQLMVSKPWGVFISFSFISLSFYHAISISSVPSGRQVV

SEQ ID NO: 95 - protein, 150 aa, Homo sapiens
  SITE (12): Xaa equals any of the naturally occurring L-amino acids
  SITE (38): Xaa equals any of the naturally occurring L-amino acids
  SITE (43): Xaa equals any of the naturally occurring L-amino acids
  SITE (145): Xaa equals any of the naturally occurring L-amino acids
CPPPPKRGGIEXELGKLWPTFETFRANRRTMLLEPLGXPGGGXRPFWKRARGVTSEAIVTGRCNHCPDCGKAWREQGESTPSTCPFDPLTCWWLALAKPETGGQEPLSVAAYGGQPSEVKAGQKVEKGLGGTHGEQSTKFTPFVXWHWKI

SEQ ID NO: 96 - protein, 35 aa, Homo sapiens
MVSKPWGVFISFSFISLSFYHAISISSVPSGRQVV

SEQ ID NO: 97 - protein, 13 aa, Homo sapiens
MKSLHGRLLWQSA

SEQ ID NO: 98 - protein, 13 aa, Homo sapiens
MKSLHGRLLWQSA

SEQ ID NO: 99 - protein, 353 aa, Homo sapiens
  SITE (260): Xaa equals any of the naturally occurring L-amino acids
MPWPLLLLLAVSGAQTTRPCFPGCQCEVETFGLFDSFSLTRVDCSGLGPHIMPVPIPLDTAHLDLSSNRLEMVNESVLAGPGYTTLAGLDLSHNLLTSISPTAFSRLRYLESLDLSHNGLTALPAESFTSSPLSDVNLSHNQLREVSVSAFTTHSQGRALHVDLSHNLIHRLVPHPTRAGLPAPTIQSLNLAWNRLHAVPNLRDLPLRYLSLDGNPLAVIGPGAFAGLGGLTHLSLASLQRLPELAPSGFRELPGLQVLXLSGNPKLNWAGAEVFSGLSSLQELDLSGTNLVPLPEALLLHLPALQSVSVGQDVRCRRLVREGTYPRRPGSSPKVALHCVDTRESAARGPTIL

SEQ ID NO: 100 - protein, 353 aa, Homo sapiens
MPWPLLLLLAVSGAQTTRPCFPGCQCEVETFGLFDSFSLTRVDCSGLGPHIMPVPIPLDTAHLDLSSNRLEMVNESVLAGPGYTTLAGLDLSHNLLTSISPTAFSRLRYLESLDLSHNGLTALPAESFTSSPLSDVNLSHNQLREVSVSAFTTHSQGRALHVDLSHNLIHRLVPHPTRAGLPAPTIQSLNLAWNRLHAVPNLRDLPLRYLSLDGNPLAVIGPGAFAGLGGLTHLSLASLQRLPELAPSGFRELPGLQVLDLSGNPKLNWAGAEVFSGLSSLQELDLSGTNLVPLPEALLLHLPALQSVSVGQDVRCRRLVREGTYPRRPGSSPKVALHCVDTRESAARGPTIL

SEQ ID NO: 101 - protein, 285 aa, Homo sapiens
  SITE (259): Xaa equals any of the naturally occurring L-amino acids
  SITE (262): Xaa equals any of the naturally occurring L-amino acids
  SITE (280): Xaa equals any of the naturally occurring L-amino acids
MGFLQLLVVAVLASEHRVAGAAEVFGNSSEGLIEFSVGKFRYFELNRPFPEEAILHDISSNVTFLIFQIHSQYQNTTVSFSPTLLSNSSETGTASGLVFILRPEQSTCTWYLGTSGIQPVQNMAILLSYSERDPVPGGCNLEFDLDIDPNIYLEYNFFETTIKFAPANLGYARGVDPPPCDAGTDQDSRWRLQYDVYQYFLPENDLTEEMLLKHLQRMVSVPQVKASALKVVTLTANDKTSVSFSSLPGQGVIYNVIVXGPXSKYICCLHSCSHIRLQLXRAGRG

SEQ ID NO: 102 - protein, 417 aa, Homo sapiens
LFLFSKYTHSIRIQLFPFLRGVDPPPCDAGTDQDSRWRLQYDVYQYFLPENDLTEEMLLKHLQRMVSVPQVKASALKVVTLTANDKTSVSFSSLPGQGVIYNVIVWDPFLNTSAAYIPAHTYACSFEAGEGSCASLGRVSSKVFFTLFALLGFFICFFGHRFWKTELFFIGFIIMGFFFYILITRLTPIKYDVNLILTAVTGSVGGMFLVAVWWRFGILSICMLCVGLVLGFLISSVTFFTPLGNLKIFHDDGVFWVTFSCIAILIPVVFMGCLRILNILTCGVIGSYSVVLAIDSYWSTSLSYITLNVLKRALNKDFHRAFTNVPFQTNDFIILAVWGMLAVSGITLQIRRERGRPFFPPHPYKLWKQERERRVTNILDPSYHIPPLRERLYGRLTQIKGLFQKEQPAGERTPLLL

SEQ ID NO: 103 - protein, 363 aa, Homo sapiens
MGFLQLLVVAVLASEHRVAGAAEVFGNSSEGLIEFSVGKFRYFELNRPFPEEAILHDISSNVTFLIFQIHSQYQNTTVSFSPTLLSNSSETGTASGLVFILRPEQSTCTWYLGTSGIQPVQNMAILLSYSERDPVPGGCNLEFDLDIDPNIYLEYNFFETTIKFAPANLGYARGVDPPPCDAGTDQDSRWRLQYDVYQYFLPENDLTEEMLLKHLQRMVSVPQVKASALKVVTLTANDKTSVSFSSLPGQGVIYNVIVWDLFLNTSAAYIPAHTYACSFEAGEGSCASLGRVSSKVFFTLFALLGFFICFFGQRFWKTELFFIGFIIMGFFFYILITRLTPIKYDAEHTDLWSHWLLFGGFSH

SEQ ID NO: 104 - protein, 79 aa, Homo sapiens
  SITE (42): Xaa equals any of the naturally occurring L-amino acids
  SITE (49): Xaa equals any of the naturally occurring L-amino acids
  SITE (69): Xaa equals any of the naturally occurring L-amino acids
  SITE (76): Xaa equals any of the naturally occurring L-amino acids
MLVKGEGVRLVLRLLGRNGLHLAPLPALLLHFLMLPLSAPVXYSLPAGXCLQGTGSSSFYSVKFSGSLXGGKGKPXNWP

SEQ ID NO: 105 - protein, 71 aa, Homo sapiens [sequence omitted]

SEQ ID NO: 106 - protein, 31 aa, Homo sapiens
MFEALWATDYLCCLFLFVSFFRPLQKCKNHS

SEQ ID NO: 107 - protein, 26 aa, Homo sapiens [sequence omitted]

SEQ ID NO: 108 - protein, 31 aa, Homo sapiens; identical to SEQ ID NO: 106

SEQ ID NO: 109 - protein, 118 aa, Homo sapiens
MEFVSGGKTEILMLFTLLVSCYVFLPLALPCFAFFFSFWPIPFYMCPQQRWGDTEHPGSFPALLGRPRLQAPAVETLKGNKQPSTLPDPRLFREAAHFHPGPRTPSLCPTRISLNGRD

SEQ ID NO: 110 - protein, 157 aa, Homo sapiens
SCLPPLPLNLPLPPCLCPLLQLNAAMTRKEKTKEGQRAAQFSAGADAGSGGGLSRQKDTKRPMLLVIHDVVLELLTSSDCHANPRKYPTCQKSEVLGVSIYVSICPSTRPRDKNKTKKRCQVLEAVLVSKPSGSCHQGSFEIVPHVKGNLAFTSSNH

SEQ ID NO: 111 - protein, 118 aa, Homo sapiens; identical to SEQ ID NO: 109

SEQ ID NO: 112 - protein, 74 aa, Homo sapiens
LALHRCSLSCLQVSVCGVGYGEENLHGGPPGLVVQAVPRHILIPSMGHLKMNNNSQNFCEIKSSFKRSHLSKRF

SEQ ID NO: 113 - protein, 199 aa, Homo sapiens
MKSGLWYFFLFCLRIKVLTGEINGSANYEMFIFHNGGVQILCKYPDIVQQFKMQLLKGGQILCDLTKTKGSGNTVSIKSLKFCHSQLSNNSVSFFLYNLDHSHANYYFCNLSIFDPPPFKVTLTGGYLHIYESQLCCQLKFWLPIGCAAFVVVCILGCILICWLTKKKYSSSVHDPNGEYMFMRAVNTAKKSRLTDVTL

SEQ ID NO: 114 - protein, 199 aa, Homo sapiens; identical to SEQ ID NO: 113

SEQ ID NO: 115 - protein, 91 aa, Homo sapiens
  SITE (12): Xaa equals any of the naturally occurring L-amino acids
  SITE (49): Xaa equals any of the naturally occurring L-amino acids
  SITE (51): Xaa equals any of the naturally occurring L-amino acids
MVLRGWGLAWSXSPVVCGYSGDMKGVCWGRSDHSLLPSEILLPPAPCPXSXVLHNPPPTPHLPSPVLVRIQEAPTWAQRSSLGASPLHKGD

SEQ ID NO: 116 - protein, 6 aa, Homo sapiens
WALPMS

SEQ ID NO: 117 - protein, 14 aa, Homo sapiens
GCSLYNSFNNLLCL

SEQ ID NO: 118 - protein, 4 aa, Homo sapiens
LREL

SEQ ID NO: 119 - protein, 91 aa, Homo sapiens
MVLRGWGLAWSLSPVVCGYSGDMKGVCWGRSDHSLLPSEILLPPAPCPSSAVLHNPPPTPHLPSPVLVRIQEAPTWAQRSSLGASPLHKGD

SEQ ID NO: 120 - protein, 75 aa, Homo sapiens
EDMPRRKEELTDYQKKKVILQNLKHSLFLSLLSHYFYSNPLEYLHFASEQRDKFFSHHVCTGVVLILDIAGTNFS

SEQ ID NO: 121 - protein, 56 aa, Homo sapiens
MMIYFALLLASLFFLLKVKSHFGCKNVTTTSARIFLKPLCTPKSIFPLSRYGRMSS

SEQ ID NO: 122 - protein, 56 aa, Homo sapiens; identical to SEQ ID NO: 121

SEQ ID NO: 123 - protein, 59 aa, Homo sapiens [sequence omitted]

SEQ ID NO: 124 - protein, 114 aa, Homo sapiens
  SITE (7): Xaa equals any of the naturally occurring L-amino acids
  SITE (22): Xaa equals any of the naturally occurring L-amino acids
  SITE (24): Xaa equals any of the naturally occurring L-amino acids
  SITE (111): Xaa equals any of the naturally occurring L-amino acids
QRAMACXFGILLIVSATLCFGXLXGFLMTLPQKRKSFQSKSFVRLKDVTAYMWEKVLTFLRLETPKLEEAEMVENHNYYLDEFANLLDELLMKINGLSDSLQLPLLEKTSXNTG

SEQ ID NO: 125 - protein, 85 aa, Homo sapiens
  SITE (81): Xaa equals any of the naturally occurring L-amino acids
  SITE (84): Xaa equals any of the naturally occurring L-amino acids
MDILMLLLLLCVIYGRFSQDEYSLNQAIRKEFTRNARNCLGGLRNIADWWDWSLTTLLDGLYPGGTPSARVPGASAWSSWXKMXT

SEQ ID NO: 126 - protein, 561 aa, Homo sapiens
MDILMLLLLLCVIYGRFSQDEYSLNQAIRKEFTRNARNCLGGLRNIADWWDWSLTTLLDGLYPGGTPSARVPGAQPGALGGKCYLIGSSVIRQLKVFPRHLCKPPRPFSALIEDSIPTCSPEVGGPENPYLIDPENQNVTLNGPGGCGTREDCVLSLGRTRTEAHTALSRLRASMWIDRSTRAVSVHFTLYNPPTQLFTSVSLRVEILPTGSLVPSSLVESFSIFRSDSALQYHLMLPQLVFLALSLIHLCVQLYRMMDKGVLSYWRKPRNWLELSVVGVSLTYYAVSGHLVTLAGDVTNQFHRGLCRAFMDLTLMASWNQRARWLRGILLFLFTLKCVYLPGIQNTMASCSSMMRHSLPSIFVAGLVGALMLAALSHLHRFLLSMWVLPPGTFTDAFPGLLFHFPRRSQKDCLLGLSKSDQRAMACYFGILLIVSATLCFGMLRGFLMTLPQKRKSFQSKSFVRLKDVTAYMWEKVLTFLRLETPKLEEAEMVENHNYYLDEFANLLDELLMKINGLSDSLQLPLLEKTSNNTGEARTEESPLVDISSYQAAEPADIKDF

SEQ ID NO: 127 - protein, 88 aa, Homo sapiens
  SITE (1): Xaa equals any of the naturally occurring L-amino acids
  SITE (19): Xaa equals any of the naturally occurring L-amino acids
  SITE (81): Xaa equals any of the naturally occurring L-amino acids
XHKTFPSEGSSCLSSVTLXTTAQAYFTLPPPTHHCPLSATKPHYSSNDASLVSGKPIWCTKMLCNTKWLLPLILLNNVNSXRINFMLC

SEQ ID NO: 128 - protein, 56 aa, Homo sapiens
MWKVLRPSLFTAGLFTASFFYSDLKVSTELMKLQHMVFKSFPLKCTLENWVPQPHY

SEQ ID NO: 129 - protein, 58 aa, Homo sapiens [sequence omitted]

SEQ ID NO: 130 - protein, 32 aa, Homo sapiens
CLETFWSLYLGGWGMVGCVCYWHPVNRSQGCR

SEQ ID NO: 131 - protein, 199 aa, Homo sapiens
  SITE (142): Xaa equals any of the naturally occurring L-amino acids
MKLGCVLMAWALYLSLGVLWVAQMLLAASFETLQCEGPVCTEESSCHTEDDLTDAREAGFQVKAYTFSEPFHLIVSYDWLILQGPAKPVFEGDLLVLRCQAWQDWPLTQVTFYRDGSALGPPGPNREFSITVVQKADSGHYXCSGIFQSPGPGIPETASVVAITVQELFPAPILLLQGWKDSAKQGGSPQNSRSPQLQK

SEQ ID NO: 132 - protein, 2 aa, Homo sapiens
SW

SEQ ID NO: 133 - protein, 359 aa, Homo sapiens
MKLGCVLMAWALYLSLGVLWVAQMLLAASFETLQCEGPVCTEESSCHTEDDLTDAREAGFQVKAYTFSEPFHLIVSYDWLILQGPAKPVFEGDLLVLRCQAWQDWPLTQVTFYRDGSALGPPGPNREFSITVVQKADSGHYHCSGIFQSPGPGIPETASVVAITVQELFPAPILRAVPSAEPQAGGPMTLSCQTKLPLQRSAARLLFSFYKDGRIVQSRGLSSEFQIPTASEDHSGSYWCEAATEDNQVWKQSPQLEIRVQGASSSAAPPTLNPAPQKSAAPGTAPEEAPGPLPPPPTPSSEDPGFSSPLGMPDPHLYHQMGLLLKHMQDVRVLLGHLLMELRELSGHRKPGTTKATAE

SEQ ID NO: 134 - protein, 5 aa, Homo sapiens
MSRLL

SEQ ID NO: 135 - protein, 5 aa, Homo sapiens
MSRLL

SEQ ID NO: 136 - protein, 63 aa, Homo sapiens [sequence omitted]

SEQ ID NO: 137 - protein, 438 aa, Homo sapiens
  SITE (42): Xaa equals any of the naturally occurring L-amino acids
LTITVHDPNAAQWYYGMSWGLRLYIPGFDVGTMFTIQKKILXSWSPPKPIRPLTDLGDPIFQKHPDKVDLTVPQPFLVPRPQLQQQHLQPSLMSILGGVHHLLNLTQPKLAQDCWLCLKAKPPYYVGLGVEATLKRGPLSCHTRPRALTIGDVSGNASCLISTGYNLSASPFQATCNQSLLTYISTSVSYQAPNNTWLACTSGLTRCINGTEPGPLLCVLVHVLPQVYVYSGPEGRQLIAPPELHPRLHQAVPLLVPLLAGLSIAGSAAIGTAALVQGETGLISLSQQVDADFSNLQSAIDILHSQVESLAEVVLQNCRCLDLLFLSQGGLCAALGESCCFYANQSGVIKGTVKKVRENLDRHQQERENNIPWYQSMFNWNPWLTTLITGLAGPLLILLLSLIFGPCILNSFLNFIKQRIASVKLTYLKTQYDTLVNN

SEQ ID NO: 138 - protein, 438 aa, Homo sapiens
LTITVHDPNAAQWYYGMSWGLRLYIPGFDVGTMFTIQKKILVSWSPPKPIRPLTDLGDPIFQKHPDKVDLTVPQPFLVPRPQLQQQHLQPSLMSILGGVHHLLNLTQPKLAQDCWLCLKAKPPYYVGLGVEATLKRGPLSCHTRPRALTIGDVSGNASCLISTGYNLSASPFQATCNQSLLTYISTSVSYQAPNNTWLACTSGLTRCINGTEPGPLLCVLVHVLPQVYVYSGPEGRQLIAPPELHPRLHQAVPLLVPLLAGLSIAGSAAIGTAALVQGETGLISLSQQVDADFSNLQSAIDILHSQVESLAEVVLQNCRCLDLLFLSQGGLCAALGESCCFYANQSGVIKGTVKKVRENLDRHQQERENNIPWYQSMFNWNPWLTTLITGLAGPLLILLLSLIFGPCILNSFLNFIKQRIASVKLTYLKTQYDTLVNN

SEQ ID NO: 139 - protein, 62 aa, Homo sapiens
MFCRNWRCEFMMLSHNTAVMICSFSQNDFHAALCCSSVSELPYLFLVCSTYKCSCHAVLFFC

SEQ ID NO: 140 - protein, 62 aa, Homo sapiens; identical to SEQ ID NO: 139

SEQ ID NO: 141 - protein, 76 aa, Homo sapiens
INFTYKRLSLDFIYIYMCVCVCVCVCVCVCVYLKRTCASIKGNKMREYIIDFVKSKYLNYGFSIFKNSCSFCTYFF

SEQ ID NO: 142 - protein, 42 aa, Homo sapiens
MFLFITFTILAIFIIEPRNLRVDLNLIKFQTSWPKTLVEEQN

SEQ ID NO: 143 - protein, 42 aa, Homo sapiens; identical to SEQ ID NO: 142

SEQ ID NO: 144 - protein, 23 aa, Homo sapiens
AWIQCTLLLYPRRTSQGIHQVPG

SEQ ID NO: 145 - protein, 20 aa, Homo sapiens
LLMRQPWVGQGWGPVVEETC

SEQ ID NO: 146 - protein, 322 aa, Homo sapiens
  SITE (131): Xaa equals any of the naturally occurring L-amino acids
  SITE (185): Xaa equals any of the naturally occurring L-amino acids
  SITE (218): Xaa equals any of the naturally occurring L-amino acids
  SITE (220): Xaa equals any of the naturally occurring L-amino acids
  SITE (250): Xaa equals any of the naturally occurring L-amino acids
  SITE (312): Xaa equals any of the naturally occurring L-amino acids
MALPPGPAALRHTLLLLPALLSSGWGELEPQIDGQTWAERALRENERHAFTCRVAGGPGTPRLAWYLDGQLQEASTSRLLSVGGEAFSGGTSTFTVTAHRAQHELNCSLQDPRSGRSANASVILNVQFKPXIAQVGAKYQEAQGPGLLVVLFALVRANPPANVTWIDQDGPVTVNTSDFLVLDAXNYPWLTNHTVQLQLRSLAHNLSVVATNDVGVTXAXLPAPGPSRHPSLISSDSNNLKLNNVRLPRXNMSLPSNLQLNDLTPDSRAVKPADRQMAQNNSRPELLDPEPGGLLTSQGFIRLPVLGYIYRXSSVSSDEIWL

SEQ ID NO: 147 - protein, 322 aa, Homo sapiens
MALPPGPAALRHTLLLLPALLSSGWGELEPQIDGQTWAERALRENERHAFTCRVAGGPGTPRLAWYLDGQLQEASTSRLLSVGGEAFSGGTSTFTVTAHRAQHELNCSLQDPRSGRSANASVILNVQFKPEIAQVGAKYQEAQGPGLLVVLFALVRANPPANVTWIDQDGPVTVNTSDFLVLDAQNYPWLTNHTVQLQLRSLAHNLSVVATNDVGVTSASLPAPGPSRHPSLISSDSNNLKLNNVRLPRENMSLPSNLQLNDLTPDSRAVKPADRQMAQNNSRPELLDPEPGGLLTSQGFIRLPVLGYIYRVSSVSSDEIWL

SEQ ID NO: 148 - protein, 25 aa, Homo sapiens
MISLLWTLKLFSRNLDYSQKRKSWC

SEQ ID NO: 149 - protein, 25 aa, Homo sapiens
MISLLWTLKLFSRNLDYSQKRKSWC

SEQ ID NO: 150 - protein, 18 aa, Homo sapiens
TKSSDFGGGCRNASSSCC

SEQ ID NO: 151 - protein, 26 aa, Homo sapiens
GCFKIVLFFKLVIFAKLFVFVVSINM

SEQ ID NO: 152 - protein, 18 aa, Homo sapiens
TKSSDFGGGCRNASSSCC

SEQ ID NO: 153 - protein, 143 aa, Homo sapiens [sequence omitted]

SEQ ID NO: 154 - protein, 101 aa, Homo sapiens
  SITE (91): Xaa equals any of the naturally occurring L-amino acids
  SITE (93): Xaa equals any of the naturally occurring L-amino acids
  SITE (99): Xaa equals any of the naturally occurring L-amino acids
WESLGLMFLCGPHLTRLLLFLFTLGFCAFINIVLSFPLVCIPFCLGRLYFLLLTEKPHQEACPGDELGTGHLHIGLGAVRLQGPDNMRNEXSXIVVGDXGL

SEQ ID NO: 155 - protein, 35 aa, Homo sapiens
MLNDGKVWVSCFCVVLTSLDFCSFCSLWASVLSLI

SEQ ID NO: 156 - protein, 114 aa, Homo sapiens [sequence omitted]

SEQ ID NO: 157 - protein, 26 aa, Homo sapiens
MCVSPVSVCPFLPSLHFINNWCNVSS

SEQ ID NO: 158 - protein, 106 aa, Homo sapiens
  SITE (36): Xaa equals any of the naturally occurring L-amino acids
GSDGPRERAPVAWLSHSILSLILNKYFLWGFFFFLXAVVCFKLTTWKKHLGYLWFSCLVPASTPTPFESGDSFFCVETRWPRQEVKAAIRKALGTLVPVARLQVTS

SEQ ID NO: 159 - protein, 201 aa, Homo sapiens
  SITE (10): Xaa equals any of the naturally occurring L-amino acids
  SITE (19): Xaa equals any of the naturally occurring L-amino acids
LSSLLPQRLXEPSSSSPGXRTWQLSQKSRGPSRASSMSVLNSLRSSSWWPRLHTHTSMPESPVKRRCLPGVFSLLSGAPCSELSSFSSSSLHSASLSRKAPGSSSPRPATEPLGSIPGALVAARSTGRSEGSGSAMLGGLVLLLLGSDKGLLCAPWDPLVGSMPGGLPPAGPHCGGSSCCCCSWKALYGGGGVGGRFTTSS

SEQ ID NO: 160 - protein, 52 aa, Homo sapiens
MALLLLQALPSPLSARAEPPQDKEACVGTNNQSYICDTGHCCGQSQCCKLLL

SEQ ID NO: 161 - protein, 118 aa, Homo sapiens
LLLLQALPSPLSARAEPPQDKEACVGTNNQSYICDTGHCCGQSQCCNYYYELWWFWLVWTIIIILSCCCVCHHRRAKHRLQAQQRQHEINLIAYREAHNYSALPFYFRFLPNYLLPPL

SEQ ID NO: 162 - protein, 363 aa, Homo sapiens
MERRRLLGGMALLLLQALPSPLSARAEPPQDKEACVGTNNQSYICDTGHCCGQSQCCNYYYELWWFWLVWTIIIILSCCCVCHHRRAKHRLQAQQRQHEINLIAYREAHNYSALPFYFRFLPNYLLPPYEEVVNRPPTPPPPYSAFQLQQQQLLPPQCGPAGGSPPGIDPTRGSQGAQSSPLSEPSRSSTRPPSIADPDPSDLPVDRAATKAPGMEPSGSVAGLGELDPGAFLDKDAECREELLKDDSSEHGAPDSKEKTPGRHRRFTGDSGIEVCVCNRGHHDDDLKEVNTLIDDALDGPLDFCDSCHVRPPGDEEEGLCQPSEEQAREPGHPHLPRPPACLLLNTINEQDSPNSQSNSSPS

SEQ ID NO: 163 - protein, 199 aa, Homo sapiens
  SITE (2): Xaa equals any of the naturally occurring L-amino acids
  SITE (6): Xaa equals any of the naturally occurring L-amino acids
  SITE (14): Xaa equals any of the naturally occurring L-amino acids
  SITE (34): Xaa equals any of the naturally occurring L-amino acids
  SITE (51): Xaa equals any of the naturally occurring L-amino acids
QXKPPXPAAPAAPXAPAPLEKPIRSHEATGGGEXACGVTGASTPEGTAPPXPAAPAPPKGEKEGQRPTQPVYQIQNRGMGTAAPAAMDRELGLGSTRLGTGVSSQILTASSVSCFLQSPAVVGQAKLLPPERMKHSIKLVDDQMNWCDSAIEVPRGPALPELPHILHPLIFHLSVGNTRLEGFEATYSSERGWYQNILT

SEQ ID NO: 164 - protein, 21 aa, Homo sapiens
MKNSFFTVSWALTCSFSWATV

SEQ ID NO: 165 - protein, 21 aa, Homo sapiens
MKNSFFTVSWALTCSFSWATV

SEQ ID NO: 166 - protein, 39 aa, Homo sapiens
MPLFRTFKQLGLFLFLIIPIICSSLPPLGPVQSFLGCLY

SEQ ID NO: 167 - protein, 50 aa, Homo sapiens
MLLLVVTLVNLSIYKLIKLVTALSKKLGAKGVLKNAHFMRCNCGEMRTRS

SEQ ID NO: 168 - protein, 2 aa, Homo sapiens
LL

SEQ ID NO: 169 - protein, 69 aa, Homo sapiens
  SITE (6): Xaa equals any of the naturally occurring L-amino acids
  SITE (13): Xaa equals any of the naturally occurring L-amino acids
  SITE (51): Xaa equals any of the naturally occurring L-amino acids
WYQGKXDLKGLGXVLDGSDGMAGGIPEGMAFTLYLGIWLSSPFPDCCIAFXFAYSSSPLSSGDTFQGPQ

SEQ ID NO: 170 - protein, 135 aa, Homo sapiens
  SITE (33): Xaa equals any of the naturally occurring L-amino acids
  SITE (129): Xaa equals any of the naturally occurring L-amino acids
AKMPWTCSVSDPTSCDSQAQKMPGVRASRQPGXGRQCLLLLHQVQGIWLKACIFPGHKLPEPLKWEARQFQTNLFSTHHSTFKVCLLLLPVHPPSLQFFHSLTSERVPGGSMVNKLTCMLQKKKKKKIXAVRKGI

SEQ ID NO: 171 - protein, 50 aa, Homo sapiens; identical to SEQ ID NO: 167

SEQ ID NO: 172 - protein, 77 aa, Homo sapiens [sequence omitted]

SEQ ID NO: 173 - protein, 77 aa, Homo sapiens [sequence omitted]

SEQ ID NO: 174 - protein, 56 aa, Homo sapiens
CDVKPADVKDIGGTVEASCMNFSWPAPTAQVHTRKRRVWACLRVDVSSEVRPGKAL

SEQ ID NO: 175 - protein, 68 aa, Homo sapiens
  SITE (44): Xaa equals any of the naturally occurring L-amino acids
  SITE (57): Xaa equals any of the naturally occurring L-amino acids
MAQSRVLLLLLLLPPQLAPGTCACREGPRIWPNGGHSLSPEENXLRKKSRLLLIEAXKKPGAWAQAAV

SEQ ID NO: 176 - protein, 85 aa, Homo sapiens
  SITE (26): Xaa equals any of the naturally occurring L-amino acids
MAQSRVLLLLLLLPPQLHLGPVLAVXAPGFGRSGGHSLSPEENEFAEEEPVLVLSPEEPGPGPAAVSCPRDCACSQEGVVDCGGY

SEQ ID NO: 177 - protein, 14 aa, Homo sapiens
MIYQIYGIICSLFP

SEQ ID NO: 178 - protein, 31 aa, Homo sapiens
GPFCDVTTLHLPGLLCTQCSLDPVDLYLWRS

SEQ ID NO: 179 - protein, 14 aa, Homo sapiens
MIYQIYGIICSLFP

SEQ ID NO: 180 - protein, 71 aa, Homo sapiens
  SITE (71): Xaa equals any of the naturally occurring L-amino acids
TMGPGDRHRLPVYLGHCLGCLESGLLAQILPLLGQGRPFMDSLIRVAAERRAGQVLKGTLKRFSERQGRRX

SEQ ID NO: 181 - protein, 204 aa, Homo sapiens
  SITE (1): Xaa equals any of the naturally occurring L-amino acids
  SITE (5): Xaa equals any of the naturally occurring L-amino acids
  SITE (8): Xaa equals any of the naturally occurring L-amino acids
XPSLXGTXAGGSTAVAAALELVDPPGCRNSARAAAELSLLEKSLGLSKGNKYSAQGERQIPVLQTNNGPSLTGLTTIAAHLVKQANKEYLLGSTAEEKAIVQQWLEYRVTQVDGHSSKNDIHTLLKDLNSYLEDKVYLTGYNFTLADILLYYGLHRFIVDLTVQEKEKYLNVSRWFCHIQHYPGIRQHLSSVVFIKNRLYTNSH

SEQ ID NO: 182 - protein, 54 aa, Homo sapiens
MTSPLARLLLPFWCHTLGTMALGTPNPGAMAWGAVGEPNPGAWTVPLGAFLAGR

SEQ ID NO: 183 - protein, 54 aa, Homo sapiens; identical to SEQ ID NO: 182

SEQ ID NO: 184 - protein, 1 aa, Homo sapiens
S

SEQ ID NO: 185 - protein, 3 aa, Homo sapiens
LLC

SEQ ID NO: 186 - protein, 1 aa, Homo sapiens
S

SEQ ID NO: 187 - protein, 5 aa, Homo sapiens
AGTWS

SEQ ID NO: 188 - protein, 45 aa, Homo sapiens
MAGVWNTIALWFLSVFGVISAPTTGTSPTSCRCVGPRPPGCGPAG

SEQ ID NO: 189 - protein, 46 aa, Homo sapiens
  SITE (21): Xaa equals any of the naturally occurring L-amino acids
LINVTNVGIILAVSQPLDDIXEFIIEKRSDYNKYRKENMWLPLNPY

SEQ ID NO: 190 - protein, 304 aa, Homo sapiens
  SITE (15): Xaa equals any of the naturally occurring L-amino acids
  SITE (30): Xaa equals any of the naturally occurring L-amino acids
  SITE (32): Xaa equals any of the naturally occurring L-amino acids
  SITE (187): Xaa equals any of the naturally occurring L-amino acids
MLQFQRTWKYKGEFXLHQGNAERHFMQVTXVXEISTGKRDNEFSNSGRSIPLKSVFLTQQKVPTIQQVHKFDIYDKLFPQNSVIIEYKRLHAEKESLIGNECEEFNQSTYLSKDIGIPPGEKPYESHDFSKLLSFHSLFTQHQTTHFGKLPHGYDECGDAFSCYSFFTQPQRIHSGEKPYACNDCGXAFSPTSFSVNIKELILGRNLMNVRNVTKLSDRVLTLLNIRGSTLERNRLRAMNVGRPLAVMPSLLNIREFTQVRNHMNVKNVIKPSDRVLTLINIRGFTLERNPMNVISVEKPSADA

SEQ ID NO: 191 - protein, 336 aa, Homo sapiens
MDTMNVVMPLAVTHSLLNLREFTVVEKPYACNDCGKAFSHDFFLSEHQRTHIGEKPYECKECNKAFRQSAHLAQHQRIHTGEKPFACNECGKAFSRYAFLVEHQRIHTGEKPYECKECNKAFRQSAHLNQHQRIHTGEKPYECNQCGKAFSRRIALTLHQRIHTGEKPFKCSECGKTFGYRSHLNQHQRIHTGEKPYECIKCGKFFRTDSQLNRHHRIHTGERPFECSKCGKAFSDALVLIHHKRSHAGEKPYECNKCGKAFSCGSYLNQHQRIHTGEKPYECSECGKAFHQILSLRLHQRIHAGEKPYKCNECGNNFSCVSALRRHQRIHNRETL

SEQ ID NO: 192 - protein, 54 aa, Homo sapiens
LAATRKFFLSSHSSSCKKGAMSQKEAPFHRQRLHRERGNRRLGNGGEWGRNWVQ

SEQ ID NO: 193 - protein, 27 aa, Homo sapiens
MHQLFGLFVTLMFASVGGGLGGIILVL

SEQ ID NO: 194 - protein, 106 aa, Homo sapiens
MPGVLGALLGVLVAGLATHEAYGDGLESVFPLIAEGQRSATSQAMHQLFGLFVTLMFASVGGGLGGIILVLCLLDPCALWHWVAPSSMVGGREASQILPYHHQGSC

SEQ ID NO: 195 - protein, 60 aa, Homo sapiens
  SITE (3): Xaa equals any of the naturally occurring L-amino acids
  SITE (17): Xaa equals any of the naturally occurring L-amino acids
NLXCCEPLKGTEIVHLXSSDFKAVACRCSQLNKALPSTTLRGFVCGSSCYISWFPNQETR

SEQ ID NO: 196 - protein, 82 aa, Homo sapiens
  SITE (26): Xaa equals any of the naturally occurring L-amino acids
  SITE (28): Xaa equals any of the naturally occurring L-amino acids
PGNEVTDGQPRQPLRRLRLPCGASLXRXPASPSDAIQRALPGRKLPRWNASPEQRVAVPCGGLTQWLNTGKELALGVRTSET

SEQ ID NO: 197 - protein, 94 aa, Homo sapiens
  SITE (2): Xaa equals any of the naturally occurring L-amino acids
RXPIFIGENFYPPVRGRVGMSACQGGGGGGGGGGGGGGGGGGGGGGGGGGGGVDKLPCLTMCWCGNGAQPARLKVDGIPTGQRKSYADTPAWPG

SEQ ID NO: 198 - protein, 257 aa, Homo sapiens
  SITE (27): Xaa equals any of the naturally occurring L-amino acids
MTAAVFFGCAFIAFGPALALYVFTIAXEPLRIIFLIAGAFFWLVSLLISSLVWFMARVIIDNKDGPTQKYLLIFGAFVSVYIQEMFRFAYYKLLKKASEGLKSINPGETAPSMRLLAYVSGLGFGIMSGVFSFVNTLSDSLGPGTVGIHGDSPQFFLYSAFMTLVIILLHVFWGIVFFDGCEKKKWGILLIVLLTHLLVSAQTFISSYYGINLASAFIILVLMGTWAFLAAGGSCRSLKLCLLCQDKNFLLYNQRSR

SEQ ID NO: 199 - protein, 257 aa, Homo sapiens [sequence omitted]

SEQ ID NO: 200 - protein, 36 aa, Homo sapiens
  SITE (8): Xaa equals any of the naturally occurring L-amino acids
  SITE (12): Xaa equals any of the naturally occurring L-amino acids
  SITE (16): Xaa equals any of the naturally occurring L-amino acids
  SITE (18): Xaa equals any of the naturally occurring L-amino acids
  SITE (19): Xaa equals any of the naturally occurring L-amino acids
  SITE (23): Xaa equals any of the naturally occurring L-amino acids
WRHLTVSXGLQXRLSXRXXWEGXPRSTTAAGWGRTG

SEQ ID NO: 201 - protein, 21 aa, Homo sapiens
HLSLPRLLWTLQIPQCPQLQD

SEQ ID NO: 202 - protein, 78 aa, Homo sapiens
DPQNIYWEHLSIRGFIWWLRCLVINVVLFILLFFLTTPAIIITTMDKFNVTKPVEYLNVRPHAPVTFHAGSQHTDTRP

SEQ ID NO: 203 - protein, 318 aa, Homo sapiens
MHKCYTFLIFMVLLLPSLGLSSLDLFFRWLFDKKFLAEAAIRFECVFLPDNGAFFVNYVIASAFIGNAMDLLRIPGLLMYMIRLCLARSAAERRNVKRHQAYEFRFGAAYAWMMCVFTVVMTYSITCPIIVPFGLMYMLLKHLVDRYNLYYAYLPAKLDKKIHSGAVNQVVAAPILCLFWLLFFSTMRTGFLAPTSMFTFVVLVITIVICLCHVCFGHFKYLSAHNYKIEHTETDTVDPRSNGRPPTAAAVPKSAKYIAQVLQDSEVDGDGDGAPGSSGDEPPSSSSQDEELLMPPDALTDTDFQSCEDSLIENEIHQ

SEQ ID NO: 204 - protein, 65 aa, Homo sapiens
  SITE (9): Xaa equals any of the naturally occurring L-amino acids
  SITE (21): Xaa equals any of the naturally occurring L-amino acids
VVVELINRXQNYFQYIVYLYXKRDGPFYGGTLSMVVFCDVLFLLLLFALFSPITALLSLKRINFI

SEQ ID NO: 205 - protein, 50 aa, Homo sapiens [sequence omitted]

SEQ ID NO: 206 - protein, 90 aa, Homo sapiens
DLTCLLSSNFIIGINVHFFPVPVSEAFICVCMCVLNKCIRYLKNSNLNLNNLKNEIVILCVKVSDVLYSALKTIFIYSSTDTKYILKLLS

SEQ ID NO: 207 - protein, 41 aa, Homo sapiens
MSCLWAGIKFLGFGFCWMDCSLCEPIWVCQIQSLGCHGNLA

SEQ ID NO: 208 - protein, 103 aa, Homo sapiens
SLDTALLSTLCSLAFTAASTSSTVAYVTNPKPLEHLVFGSLITTVCECSLLLRMAHWTLTGHFKAQLSDEELLQLLGLLKRLCLRHDSSGKRDFNDVFSGIHG

SEQ ID NO: 209 - protein, 49 aa, Homo sapiens
MRQTKLEGWLIFPLFSCFSFISLGSDEGPEIFISHLKSLADYSRALVEV

SEQ ID NO: 210 - protein, 49 aa, Homo sapiens; identical to SEQ ID NO: 209

SEQ ID NO: 211 - protein, 489 aa, Homo sapiens
  SITE (79): Xaa equals any of the naturally occurring L-amino acids
  SITE (321): Xaa equals any of the naturally occurring L-amino acids
MPQASEHRLGRTREPPVNIQPRVGSKLPFAPRARSKERRNPASGPNPMLRPLPPRPGLPDERLKKLELGRGRTSGPRPXGPLRADHGVPLPGSPPPTVALPLPSRTNLARSKSVSSGDLRPMGIALGGHRGTGELGAALSRLALRPEPPTLRRSTSLRRLGGFPGPPTLFSIRTEPPASHGSFHMISARSSEPFYSDDKMAHHTLLLGSGHVGLRNLGNTCFLNAVLQCLSSTRPLRDFCLRRDFRQEVPGGGRAQELTEAFADVIGALWHPDSCEAVNPTRFRAVFQKYVPSFSGYSQQDAQEFLKLLMERLHLEINRRXRRAPPILANGPVPSPPRRGGALLEEPELSDDDRANLMWKRYLEREDSKIVDLFVGQLKSCLKCQACGYRSTTFEVFCDLSLPIPKKGFAGGKVSLRDCFNLFTKEEELESENAPVCDRCRQKTRSTKKLTVQRFPRILVLHLNRFSASRGSIKKSSVGVDFSTAATEP

SEQ ID NO: 212 - protein, 463 aa, Homo sapiens
ARGTNLARSKSVSSGDLRPMGIALGGHRGTGELGAALSRLALRPEPPTLRRSTSLRRLGGFPGPPTLFSIRTEPPASHGSFHMISARSSEPFYSDDKMAHHTLLLGSGHVGLRNLGNTCFLNAVLQCLSSTRPLRDFCLRRDFRQEVPGGGRAQELTEAFADVIGALWHPDSCEAVNPTRFRAVFQKYVPSFSGYSQLDAQEFLKLLMERLHLEINRRDRRAPPILANGPVPSPPRRGGALLEEPELSDDDRANLMWKRYLEREDSKIVDLFVGQLKSCLKCQACGYRSTTFEVFCDLSLPIPKKGFAGGKVSLRDCFNLFTKEEELESENAPVCDRCRQKTRSTKKLTVQRFPRILVLHLNRFSASRGSIKKSSVGVDFPLQRLSLGDFASDKAGSPVYQLYALCNHSGSVHYGHYTALCRCQTGWHVYNDSRVSPVSENQVASSEGYVLFYQLMQEPPRCL

SEQ ID NO: 213 - protein, 53 aa, Homo sapiens
KIELMVCTKSLVYVLVFQNNFYINIYIVKKFFLIFGWDIRKYLYYTLSYYNGT

SEQ ID NO: 214 - protein, 9 aa, Homo sapiens
LLSCFYFFL

SEQ ID NO: 215 - protein, 66 aa, Homo sapiens
  SITE (8): Xaa equals any of the naturally occurring L-amino acids
  SITE (11): Xaa equals any of the naturally occurring L-amino acids
  SITE (18): Xaa equals any of the naturally occurring L-amino acids
  SITE (61): Xaa equals any of the naturally occurring L-amino acids
MLLLCYHXFLXFVLGTGXVNIEEAEKLLKPYLNRYPKGAIFLFFAGRIEVIKGNIDAAIRXFEECC

SEQ ID NO: 216 - protein, 66 aa, Homo sapiens; identical to SEQ ID NO: 215
  SITE (8): Xaa equals any of the naturally occurring L-amino acids
  SITE (11): Xaa equals any of the naturally occurring L-amino acids
  SITE (18): Xaa equals any of the naturally occurring L-amino acids
  SITE (61): Xaa equals any of the naturally occurring L-amino acids

SEQ ID NO: 217 - protein, 43 aa, Homo sapiens
MYKITYRVCFLCQPLMVGLGCIGSIAIVLLLLLLVPHVCPKIL

SEQ ID NO: 218 - protein, 43 aa, Homo sapiens; identical to SEQ ID NO: 217

SEQ ID NO: 219 - protein, 79 aa, Homo sapiens
APLAASTILAVASARILAALKSLREFSRSLSPSASALMALTRSDVAWARMRACRTISPASPMELKMFSVTVRMVSVAWS

SEQ ID NO: 220 - protein, 72 aa, Homo sapiens
MGTLMVLTRLAVLLATSLADCTNWRLAVGLVVRAEARRQLLHSAEVCLATMVAAESTWAWVQPGSPKLWQAI

SEQ ID NO: 221 - protein, 72 aa, Homo sapiens; identical to SEQ ID NO: 220

SEQ ID NO: 222 - protein, 43 aa, Homo sapiens
MCRTQFHLFWFIVTELSPVIWAKANQKLSCLSQQTLVLVYFCR

SEQ ID NO: 223 - protein, 84 aa, Homo sapiens
  SITE (36): Xaa equals any of the naturally occurring L-amino acids
  SITE (37): Xaa equals any of the naturally occurring L-amino acids
FSIFKNHISLCWLIIINFKHSFLQSGFSEFFFFKQXXHSFFLVTSKGGTGVGGKECLKMKSLDIEGPRRTGYAKIISNSSTILE

SEQ ID NO: 224 - protein, 43 aa, Homo sapiens; identical to SEQ ID NO: 222

SEQ ID NO: 225 - protein, 27 aa, Homo sapiens
PHCRWPGLYRQLGRRRRSTALLRCHNV

SEQ ID NO: 226 - protein, 37 aa, Homo sapiens
MRKRRPYNRWTGCWLRLAVSCRWAVAISASPWLRLTS

SEQ ID NO: 227 - protein, 37 aa, Homo sapiens; identical to SEQ ID NO: 226

SEQ ID NO: 228 - protein, 153 aa, Homo sapiens
  SITE (98): Xaa equals any of the naturally occurring L-amino acids
MAATQTGTCLMVAALCFVLVLGSLVPCLPEFSSGSQTVKEDPLAADGVYTASQMPSRSLLFYDDGAGLWEDGRSTLLPMEPPDGWEINPGGPAEQRPXDHLQHDHLDSTHETTKYLSEAWPKDGGNGTSPDFSHSKEWFHDRDLGPNTTIKLS

SEQ ID NO: 229 - protein, 153 aa, Homo sapiens
MAATQTGTCLMVAALCFVLVLGSLVPCLPEFSSGSQTVKEDPLAADGVYTASQMPSRSLLFYDDGAGLWEDGRSTLLPMEPPDGWEINPGGPAEQRPRDHLQHDHLDSTHETTKYLSEAWPKDGGNGTSPDFSHSKEWFHDRDLGPNTTIKLS

SEQ ID NO: 230 - protein, 105 aa, Homo sapiens
MCLTTAGFCLLAIHSFALGVQSRQQHSVPIVFEVLPLRVPEPSRVTGCSSFFQTKVLCKQHLLGPRASVNIVLACLACCHRKGLCVHIPANLMSPSSAKLYHSLH

SEQ ID NO: 231 - protein, 37 aa, Homo sapiens
FCLIWSAYLLMCLFLFCLFYFYFSVNARTDLHVKSGL

SEQ ID NO: 232 - protein, 105 aa, Homo sapiens; identical to SEQ ID NO: 230

SEQ ID NO: 233 - protein, 5 aa, Homo sapiens
YSPLC

SEQ ID NO: 234 - protein, 40 aa, Homo sapiens
  SITE (15): Xaa equals any of the naturally occurring L-amino acids
MAYSPLLISLVLAFXPASTYGRASIDFTCFPNHYGISNQY

SEQ ID NO: 235 - protein, 160 aa, Homo sapiens
  SITE (55): Xaa equals any of the naturally occurring L-amino acids
FFDSIGALVPQFLANDDELSSHTYGLLVNKNNHLGHLAVCISQCIWGLLSPCELXGISLGSIILFCPTPCSMQTPSPACWSPSGNPGLAHTLCWRACTLMPLLRLGPYLVTLFALPSETEQLAPSALVVPCEALLLSGFLHRDPCRLPADMQDALLSVDV

SEQ ID NO: 236 - protein, 40 aa, Homo sapiens; identical to SEQ ID NO: 234
  SITE (15): Xaa equals any of the naturally occurring L-amino acids

SEQ ID NO: 237 - protein, 236 aa, Homo sapiens
  SITE (3): Xaa equals any of the naturally occurring L-amino acids
  SITE (29): Xaa equals any of the naturally occurring L-amino acids
  SITE (70): Xaa equals any of the naturally occurring L-amino acids
  SITE (73): Xaa equals any of the naturally occurring L-amino acids
  SITE (80): Xaa equals any of the naturally occurring L-amino acids
  SITE (97): Xaa equals any of the naturally occurring L-amino acids
  SITE (112): Xaa equals any of the naturally occurring L-amino acids
  SITE (117): Xaa equals any of the naturally occurring L-amino acids
  SITE (122): Xaa equals any of the naturally occurring L-amino acids
MEXPAQLLFLLLLWLPDTTGEIVLTQSPXTLSLSPGERATLSCRASQSVSSYLAWYQQKPGQAPRLLIYXASXRATGIPXRFSGSGSGTDFTLTISXLEPEDFAVYYCQQRXNWPPXYTFGXGTKVEIKRTVAAPSVFIFPPSDEQLKSGTASVVCLLNNFYPREAKVQWKVDNALQSGNSQESVTEQDSKDSTYSLSSTLTLSKADYEKHKVYACEVTHQGLSSPVTKSFNRGEC

SEQ ID NO: 238 - protein, 144 aa, Homo sapiens
MRVPAQLLGLLLLWLSGAKCDTQMTQSPSSLSASVGDTVTITCQASDDISKDLNWFQQKPGTAPKLLIFDASNLETGVPSRFSGSGSGTDFTFTISSLQPEDFATYYCQQYDNPPSLSAEGPKWRSNELWLHHLSSSSRHLMSS

SEQ ID NO: 239 - protein, 50 aa, Homo sapiens
  SITE (4): Xaa equals any of the naturally occurring L-amino acids
  SITE (10): Xaa equals any of the naturally occurring L-amino acids
  SITE (22): Xaa equals any of the naturally occurring L-amino acids
  SITE (35): Xaa equals any of the naturally occurring L-amino acids
  SITE (39): Xaa equals any of the naturally occurring L-amino acids
  SITE (42): Xaa equals any of the naturally occurring L-amino acids
VHAXTPFAGXCFDPVSLYWCYXNPGTHCYPTLRGXEQRXPSXRSHIVLRS

SEQ ID NO: 240 - protein, 64 aa, Homo sapiens
MVSPLISALFHVPFLWLGMFFPHSLSGPFPSHLRRASSSRKPLVKPPRARQYPPLASSGYRGRI

SEQ ID NO: 241 - protein, 26 aa, Homo sapiens
MSFPHASTLPFHKLSDLQHTLPNHQG

SEQ ID NO: 242 - protein, 64 aa, Homo sapiens; identical to SEQ ID NO: 240

SEQ ID NO: 243 - protein, 61 aa, Homo sapiens
  SITE (21): Xaa equals any of the naturally occurring L-amino acids
  SITE (27): Xaa equals any of the naturally occurring L-amino acids
  SITE (31): Xaa equals any of the naturally occurring L-amino acids
FNFKFAHRPSNPLVNLTVSPXRNSSLXTRKXPCRESKKFNTHSRPKSSHQLRKRSSSTPTT

SEQ ID NO: 244 - protein, 56 aa, Homo sapiens
MLIFLKCLTVSYAKYSSKIYTAVSNTFSTASDSWLCVKTPRGYHWFMSLETPDIEQ

SEQ ID NO: 245 - protein, 10 aa, Homo sapiens
VLLFLSLLTS

SEQ ID NO: 246 - protein, 56 aa, Homo sapiens; identical to SEQ ID NO: 244

SEQ ID NO: 247 - protein, 75 aa, Homo sapiens; identical to SEQ ID NO: 120

SEQ ID NO: 248 - protein, 55 aa, Homo sapiens
MIYFALLLASLFFLLKVKSHFGCKNVTTTSARIFLKPLCTPKSIFPLSRYGRMSS

SEQ ID NO: 249 - protein, 55 aa, Homo sapiens; identical to SEQ ID NO: 248

SEQ ID NO: 250 - protein, 85 aa, Homo sapiens
MLHNAFLFVLFALVSGYGNYAATAHDWLYENGQLSRKEADAVLYRALRAEGVARWRAWLMYAGVRLGGAKQYKTPTSSGFSSSGD

SEQ ID NO: 251 - protein, 85 aa, Homo sapiens; identical to SEQ ID NO: 250

SEQ ID NO: 252 - protein, 59 aa, Homo sapiens
MIIANIFMNPLLCAGYLFCFAYTLIHLILLTTSEVCSITAPFFTAVLQSSACPSTHWPE

SEQ ID NO: 253 - protein, 59 aa, Homo sapiens; identical to SEQ ID NO: 252

SEQ ID NO: 254 - protein, 67 aa, Homo sapiens
MLFLIYVSLLMLLFSLCLSLPHLQPPSLREILIPVHSLRFSLVSPLHGSLASSLLLQHCGTLRQVFF

SEQ ID NO: 255 - protein, 67 aa, Homo sapiens; identical to SEQ ID NO: 254

SEQ ID NO: 256 - protein, 86 aa, Homo sapiens
SLKHFWSQGFWIKDTQCATCRMVVARWEERMESYCLMIQCFRLGRWKVLEMCDGYGCATMGRYLVLLNCAHLKMVKMINFVYVLKQ

SEQ ID NO: 257 - protein, 52 aa, Homo sapiens
  SITE (36): Xaa equals any of the naturally occurring L-amino acids
  SITE (37): Xaa equals any of the naturally occurring L-amino acids
MQRLGKAPGTWQAISKCWLLLLLSLPFSQSIIISLXXGTMSYLPLYFPQYFP

SEQ ID NO: 258 - protein, 52 aa, Homo sapiens
MQRLGKAPGTWQAISKCWLLLLLSLPFSQSIIISLRAGTMSYLPLYFPQYFP

SEQ ID NO: 259 - protein, 20 aa, Homo sapiens
MLCVLLAVAFQSSPIPGAAA

SEQ ID NO: 260 - protein, 69 aa, Homo sapiens
MALFRPILLPAPGAWWWPCHHALCPSGCGFPEQPHSRCSSLELQSASRQCWLQWLGDIRPLLLQGREVT

SEQ ID NO: 261 - protein, 51 aa, Homo sapiens
  SITE (34): Xaa equals any of the naturally occurring L-amino acids
MGLIAADVNLDLLVQVVPASCLHCGVTIFPFPHXIHQKPVTKRGQTPGQGN

SEQ ID NO: 262 - protein, 51 aa, Homo sapiens
MGLIAADVNLDLLVQVVPASCLHCGVTIFPFPHFIHQKPVTKRGQTPGQGN

SEQ ID NO: 263 - protein, 13 aa, Homo sapiens
SCISWVFVMINGL

SEQ ID NO: 264 - protein, 61 aa, Homo sapiens
MNASLISWVLVLHRICLGLSDIPKENCIITISGMQLSHHGQSLGKWAEKLHVFYSLFSFLL

SEQ ID NO: 265 - protein, 322 aa, Homo sapiens
  SITE (28): Xaa equals any of the naturally occurring L-amino acids
RAPRRTGPASFSSRPAGTCSDNRVTSFXDLIHDQDEDEEEEEGQRFYAGGSERSGQQIVGPPRKKSPNELVDDLFKGAKEHGAVAVERVTKSPGETSKPRPFAGGGYRLGAAPEEESAYVAGEKRQHSSQDVHVVLKLWKSGFSLDNGELRSYQDPSNAQFLESIRRGEVPAELRRLAHGGQVNLDMEDHRDEDFVKPKGAFKAFTGEGQKLGSTAPQVLSTSSPAQQAENEAKASSSILIDESEPTTNIQIRLADGGRLVQKFNHSHRISDIRLFIVDARPAMAATSFILMTTFPNKELADESQTLKEANLLNAVIVQRLT

SEQ ID NO: 266 - protein, 61 aa, Homo sapiens; identical to SEQ ID NO: 264

SEQ ID NO: 267 - protein, 4 aa, Homo sapiens
PNSP

SEQ ID NO: 268 - protein, 64 aa, Homo sapiens [sequence omitted]

SEQ ID NO: 269 - protein, 64 aa, Homo sapiens [sequence omitted]

SEQ ID NO: 270 - protein, 58 aa, Homo sapiens
MVSLCSGLPSSCLLLGSTAAIIQRQVCLFQGARQWNPVSEFLRAHHHCGNRAGLPAVL

SEQ ID NO: 271 - protein, 58 aa, Homo sapiens; identical to SEQ ID NO: 270

SEQ ID NO: 272 - protein, 122 aa, Homo sapiens
  SITE (19): Xaa equals any of the naturally occurring L-amino acids
  SITE (73): Xaa equals any of the naturally occurring L-amino acids
KAPSSHPGLTCVSLSRLQXSLSLCFPSGPCWAGLLSSLALAGGAPGALPPWQPGQDSKMRTAELVGGSHGPAXGPGEAEPEPTAVVLWTVDPEGGLGQVPAEGPGGLCVPLGPGALVTWTPG

SEQ ID NO: 273 - protein, 130 aa, Homo sapiens
STCCGWGPLGHSRVRGCHCHLGHVGRHQHFVVTNSTVTNIFGQIPFYTSRQLLVCNPTGQREGPVTWLSHCPAPQMVLGLLFSLGPANTTVFTSAHWLSAVVPGSQWHVSPRSSLIPQHTPKGSVANTLN

SEQ ID NO: 274 - protein, 44 aa, Homo sapiens
MRLRNGTVATALAFITSFLTLSWYTTWQNGKGKENDSENVHEMY

SEQ ID NO: 275 - protein, 216 aa, Homo sapiens
  SITE (6): Xaa equals any of the naturally occurring L-amino acids
  SITE (18): Xaa equals any of the naturally occurring L-amino acids
CFPWGXALRQKLFPSALXALVPSGAQPLPATKDTVLAPLRMSQVRSLVIGLQNLLVQKDPLLSQACVGCLEALLDYLDARSPDIALHVASQPWNRFLLFTLLDAGENSFLRPEILRLMTLFMRYRSSSVLSHEEVGDVLQGVALADLSTLSNTTLQALHGFFQQLQSMGHLADHSMAQTLQASLEGLPPSTSSGQPPLQDMLCLGGVAVSLSHIRN

SEQ ID NO: 276 - protein, 122 aa, Homo sapiens
  SITE (92): Xaa equals any of the naturally occurring L-amino acids
  SITE (100): Xaa equals any of the naturally occurring L-amino acids
  SITE (109): Xaa equals any of the naturally occurring L-amino acids
  SITE (116): Xaa equals any of the naturally occurring L-amino acids
MLALTLAKADSPRTALLCSAWLLTASFSAQQHKGSLQVHQTLSVEMDQVLKALSFPKKKAALLSTAILCFLRTALRQSFSSAWNPGALKGPXTAATKDTXLTSLRMSKXGPGHWAXKTSWCK

SEQ ID NO: 277 - protein, 282 aa, Homo sapiens
MLALTLAKADSPRTALLCSAWLLTASFSAQQHKGSLQVHQTLSVEMDQVLKALSFPKKKAALLSAAILCFLRTALRQSFSSALVALVPSGAQPLPATKDTVLAPLRMSQVRSLVIGLQNLLVQKDPLLSQACVGCLEALLDYLDARSPDIALHVASQPWNRFLLFTLLDAGENSFLRPEILRLMTLFMRYRSSSVLSHEEVGDVLQGVALADLSTLSNTTLQALHGFFQQLQSMGHLADHSMAQTLQASLEGLPPSTSSGQPPLQDMLCLGGVAVSLSHIRN

SEQ ID NO: 278 - protein, 39 aa, Homo sapiens
MAFGQEVTHLTKTSWLAPLRFIKGLLGPWGWILLILDLE

SEQ ID NO: 279 - protein, 39 aa, Homo sapiens; identical to SEQ ID NO: 278

SEQ ID NO: 280 - protein, 107 aa, Homo sapiens
GLDVQPVAQGSKLTQEVREGCLAVAGANGFRGGYDGYRPSFSNTPNSGYTQSQFSAPRDYSGYQRDGYQQNFKRGSGQSGPRGAPRGRGGPPRPNRGMPQMNTQQVN

SEQ ID NO: 281 - protein, 77 aa, Homo sapiens
MGTHPKYLEMMELDIGDATQVYVAFLVYLDLMESKSWHEVNCVGLPELQLICLVGTEIEGEGLQTVVPNPHHCFPQP

SEQ ID NO: 282 - protein, 49 aa, Homo sapiens
MGGTCVLLLSSHTQSCLFVSCCHCQLIVETAISFSYSALPSAFWPLQLP

SEQ ID NO: 283 - protein, 50 aa, Homo sapiens
  SITE (43): Xaa equals any of the naturally occurring L-amino acids
  SITE (50): Xaa equals any of the naturally occurring L-amino acids
MNFLVFLSLSSSLVSAAGPRFPSREERGVGGVVLIKSEDMTLXERSKGSX

SEQ ID NO: 284 - protein, 240 aa, Homo sapiens
  SITE (67): Xaa equals any of the naturally occurring L-amino acids
GEGDDKEESVEKLDCHYSGHHPQPASFCTFGSRQIGRGYYVFDSRWNRLRCALNLMVEKHLNAQLWXKIPPVPSTTSPISTRIPHRTNSVPTSQCGVSYLAAATVSTSPVLLSSTCISPNSKSVPAHGTTLNAQPAASGAMDPVCSMQSRQVSSSSSSPSTPSGLSSVPSSPMSRKPQKLKSSKSLRPKESSGNSTNCQNASSSTSGGSGKKRKNSSPLLVHSSSSSSSSSSSSHSMGVF

SEQ ID NO: 285 - protein, 43 aa, Homo sapiens
  SITE (7): Xaa equals any of the naturally occurring L-amino acids
YSMVYMXHIFLIQSIIDGHLGWFQVFAIVNSATVNIRVHVSLW

SEQ ID NO: 286 - protein, 56 aa, Homo sapiens
  SITE (3): Xaa equals any of the naturally occurring L-amino acids
  SITE (4): Xaa equals any of the naturally occurring L-amino acids
  SITE (14): Xaa equals any of the naturally occurring L-amino acids
  SITE (21): Xaa equals any of the naturally occurring L-amino acids
FAXXDGFQLHPCPXKGHELIXFYGCIVFHGVYVPHFLNLVCHCWTFGLVPSLCYCE

SEQ ID NO: 287 - protein, 75 aa, Homo sapiens
MSWLFPATILFEEKICFSLFPRKLVGQHGHYSSCAVTPAPRCLELSVLTFMHDCKASWSIFYGASVCFRPMTFVR

SEQ ID NO: 288 - protein, 75 aa, Homo sapiens; identical to SEQ ID NO: 287

SEQ ID NO: 289 - protein, 83 aa, Homo sapiens [sequence omitted]

SEQ ID NO: 290 - protein, 223 aa, Homo sapiens
  SITE (132): Xaa equals any of the naturally occurring L-amino acids
AWYLLRVQVLQLVAAYLSLPSNNLSHSLWEQLCAQGWQTPEIALIDSHKLLRSIILLLMGSDILSTQKAAVETSFLDYGENLVQKWQVLSEVLSCSEKLVCHLGRLGSVSEAKAFCLEALKLTTKLQIPRQXALFLVLKGELELARNDIDLCQSDLQQVLFLLESCTEFGGVTQHLDSVKKVHLQKGKQQAQVPCPPQLPEEELFLRGPALELVPLWPRSLAP

SEQ ID NO: 291 - protein, 8 aa, Homo sapiens
AWFLVKPE

SEQ ID NO: 292 - protein, 223 aa, Homo sapiens
AWYLLRVQVLQLVAAYLSLPSNNLSHSLWEQLCAQGWQTPEIALIDSHKLLRSIILLLMGSDILSTQKAAVETSFLDYGENLVQKWQVLSEVLSCSEKLVCHLGRLGSVSEAKAFCLEALKLTTKLQIPRQCALFLVLKGELELARNDIDLCQSDLQQVLFLLESCTEFGGVTQHLDSVKKVHLQKGKQQAQVPCPPQLPEEELFLRGPALELVPLWPRSLAP

SEQ ID NO: 293 - protein, 88 aa, Homo sapiens
  SITE (7): Xaa equals any of the naturally occurring L-amino acids
  SITE (30): Xaa equals any of the naturally occurring L-amino acids
  SITE (43): Xaa equals any of the naturally occurring L-amino acids
  SITE (46): Xaa equals any of the naturally occurring L-amino acids
ADPSPSXWLQTHRGPRLLWPHHQQLLLSFXEPRKPLILLLPVXAPXSLKPHSCIPFSLDITPPTPWLNFLPVVAWSFGHCPGLFLSPS

SEQ ID NO: 294 - protein, 80 aa, Homo sapiens
  SITE (61): Xaa equals any of the naturally occurring L-amino acids
  SITE (69): Xaa equals any of the naturally occurring L-amino acids
  SITE (75): Xaa equals any of the naturally occurring L-amino acids
MHHHTRLVFVFLVEMGFHHVGQAGLELLTSSDLPALASQSAGITGVSHCAQLPFLPLKSKXGWELSPWXFMVAKXLNPVA

SEQ ID NO: 295 - protein, 18 aa, Homo sapiens
  SITE (4): Xaa equals any of the naturally occurring L-amino acids
  SITE (14): Xaa equals any of the naturally occurring L-amino acids
MVAXLLILLLDSGXLLAG

SEQ ID NO: 296 - protein, 126 aa, Homo sapiens
ATTSVPKYVFNLNFILMCLRDESKYMLVTSHSNVEVGRWLPGLPSPGRICGEQSDVHPSGLFSINDSLLDLLLLGFRSKRGIVVENALLGEGEPEIHKRRLPCSFAYLAAPRLGVRIPGFPSLLCH

SEQ ID NO: 297 - protein, 26 aa, Homo sapiens
MPVVLFQLWLFILKTDNAFAWLKIRR

SEQ ID NO: 298 - protein, 136 aa, Homo sapiens
  SITE (3): Xaa equals any of the naturally occurring L-amino acids
  SITE (67): Xaa equals any of the naturally occurring L-amino acids
PSXMLLLWASSLPTRCDCSFPVTPLVPLVHVICVWVMFPSAATAACHPGAGAFFSQGPSPFSRTWPXLGHREIPAEGAGETVALGLQPKRHTLAVGVHGMLALSTVTVGGFGGFPWTSGPGCPPLSWTCFIFPILT

SEQ ID NO: 299 - protein, 19 aa, Homo sapiens
QIWPFLPPSQPSGPLQRAV

SEQ ID NO: 300 - protein, 133 aa, Homo sapiens
MLLLWASSLPTRCDCSFPVTPLVPLVHVICVWVMFPSAATAACHPGAGAFFSQGPSPFSRTWPLLGHREIPAEGAGETVALGLQPKRHTLAVGVHGMLALSTVTVGGFGGFPWTSGPGCPPLSWTCFIFPILT

SEQ ID NO: 301 - protein, 11 aa, Homo sapiens
SSLKNQVSVSQ

SEQ ID NO: 302 - protein, 495 aa, Homo sapiens
MKHLWFFLLLVAAPRWVLSQVELQESGPGLVKPSQTLSLTCSVSGVSMSRGDWSWSWVRQVPGKGLEWIGHIDYTGKTDYKSSLKNQVSISQDTAKNQFFLRVESVTAADTAVYFCARLFESSGYGAWLDPWGPGILVTVSSASPTSPKVFPLSLCSTQPDGNVVIACLVQGFFPQEPLSVTWSESGQGVTARNFPPSQDASGDLYTTSSQLTLPATQCLAGKSVTCHVKHYTNPSQDVTVPCPVPSTPPTPSPSTPPTPSPSCCHPRLSLHRPALEDLLLGSEANLTCTLTGLRDASGVTFTWTPSSGKSAVQGPPDRDLCGCYSVSSVLPGCAEPWNHGKTFTCTAAYPESKTPLTATLSKSGNTFRPEVHLLPPPSEELALNELVTLTCLARGFSPKDVLVRWLQGSQELPREKYLTWASRQEPSQGTTTFAVTSILRVAAEDWKKGDTFSCMVGHEALPLAFTQKTIDRLAGKPTHVNVSVVMAEVDGTCY

SEQ ID NO: 303 - protein, 90 aa, Homo sapiens
  SITE (8): Xaa equals any of the naturally occurring L-amino acids
PYECKECXKAFRVHVHLTQHRKIHTDVKPYECKECGKTFSRASYLVQHSRIHTGKKPYECKECGKAFSSGSYLVQHQRIHTGERPYWLTY

SEQ ID NO: 304 - protein, 93 aa, Homo sapiens
  SITE (5): Xaa equals any of the naturally occurring L-amino acids
QRIHXGEKPYECNKCGKAFTVYGQLIGHQSVHTGEKPFECKECGKAFRLNSFLTEHQRVHTGEKPFKCKKCGKTFRYSSALKVHLRKHMSVIP

SEQ ID NO: 305 - protein, 9 aa, Homo sapiens
MWVCSITDQ

SEQ ID NO: 306 - protein, 264 aa, Homo sapiens
  SITE (5): Xaa equals any of the naturally occurring L-amino acids
  SITE (7): Xaa equals any of the naturally occurring L-amino acids
  SITE (13): Xaa equals any of the naturally occurring L-amino acids
  SITE (63): Xaa equals any of the naturally occurring L-amino acids
  SITE (88): Xaa equals any of the naturally occurring L-amino acids
  SITE (170): Xaa equals any of the naturally occurring L-amino acids
  SITE (171): Xaa equals any of the naturally occurring L-amino acids
TWGKXKXPFIESXPGGKIGWGKKGLFFLKVNYWGKKAFNPRGHSKKVTFHQLGLKKNPFWGLXKEVLGKAFSTFSYLVQHQRIHTSEXPYECKECGKAFSTSSPLAKHQRIHTGEKPYECKECGKSFTVYGQLTRHQSIHTGEKPFECKECGKAFRLSSFLHAHQRIHAXXKPYGCKECGKTFSRASYLVQHGRLHTGEKPCECKECGKAFSTGSYLVQHQRIHTGEKPYECKECGKAFISRHQLTVHQRVHTGEKPYKCKEEG

SEQ ID NO: 307 - protein, 9 aa, Homo sapiens
MWVCSITDQ

SEQ ID NO: 308 - protein, 10 aa, Homo sapiens
LTYLAHLLCF

SEQ ID NO: 309 - protein, 10 aa, Homo sapiens
MCSLSSEHLA

SEQ ID NO: 310 - protein, 465 aa, Homo sapiens
  SITE (16): Xaa equals any of the naturally occurring L-amino acids
  SITE (27): Xaa equals any of the naturally occurring L-amino acids
  SITE (44): Xaa equals any of the naturally occurring L-amino acids
NRRNGASQITWCSGQXKSSKWAREIGXYQTGVYQPGWGPQRHAXGEIATRAISMLAILTGNVGINGGNSGAREGSYSLPFVRMPTLENPIQTSISMFMWTDAIERGPEMTALRDGVRGKDKLDVPIKMIWNYAGNCLINQHSEINRTHEILQDDKKCELIVVIDCHMTSSAKYADILLPDCTASEQMDFALDASCGNMSYVIFNDQVIKPRFECKTIYEMTSELAKRLGVEQQFTEGRTQEEWMRHLYAQSREAIPELPTFEEFRKQGIFKKRDPQGHHVAYKAFREDPQANPLTTPSGKIEIYSQALADIAATWELPEGDVIDPLPIYTPGFESYQDPLNKQYPLQLTGFHYKSRVHSTYGNVDVLKAACRQEMWINPLDAQKRGIHNGDKVRIFNDRGEVHIEAKVTPRMMPGVVALGEGAWYDPDAKRVDKGGCINVLTTQRPSPLAKGNPSHTNLVQVEKV

SEQ ID NO: 311 - protein, 185 aa, Homo sapiens
MAQANSTLGAGGWVGNGVYVSGVQREYDAFITNQLRAAQTQSSGLTARYEQMSKIDNMLSTSTSSLATQMQDFFTSLQTLVSNAEDPAARQALIGKSEGLVNQFKTTDQYLRDQDKQVNIAIGASVDQINNYAKQIASLNDQISRLTGVGAGASPNNLLDQRDQLGERIKPDCWCRSQRSGWRHL

SEQ ID NO: 312 - protein, 56 aa, Homo sapiens
MSHCAWPPLLIFITRVQWATATKCQFTAKSGIGLTQGCSSVFVKLGLFLICPYDWE

SEQ ID NO: 313 - protein, 56 aa, Homo sapiens; identical to SEQ ID NO: 312

SEQ ID NO: 314 - protein, 42 aa, Homo sapiens
LPARLLQRSPRRCRRRRVPSPSLAHVGRRVQPCYSRAPPLSS

SEQ ID NO: 315 - protein, 146 aa, Homo sapiens
  SITE (7): Xaa equals any of the naturally occurring L-amino acids
MAALLLXPLLLLLPLLLLKLHLWPQLRWLPAATAARGALEKASGQRREPEMQRPEAARSLPEGTVPPEVEEPPPLCHLEQLWRCSSPLAQSFCGSGSGWPRPACALPLCPPPCAGAPCCTASAAAARARWCWRQSFWSPWSRTCPP

SEQ ID NO: 316 - protein, 174 aa, Homo sapiens
  SITE (151): Xaa equals any of the naturally occurring L-amino acids
  SITE (161): Xaa equals any of the naturally occurring L-amino acids
  SITE (164): Xaa equals any of the naturally occurring L-amino acids
MAALLLLPLLLLLPLLLLKLHLWPQLRWLPADLAFAVRALCCKRALRARALAAAAADPEGPEGGCSLAWRLAELAQQRAAHTFLIHGSRRFSYSEAERESNRAARAFLRALGWDWGPDGGDSGEGSAGEGERAAPGAGDASGRKRRGVCRXGTVPPEGGRXPPXPFVTLEANCG

SEQ ID NO: 317 - protein, 119 aa, Homo sapiens
  SITE (14): Xaa equals any of the naturally occurring L-amino acids
  SITE (78): Xaa equals any of the naturally occurring L-amino acids
QWGGGQLMELVPLXCAFPGVGSWGWEQGKAASSLGFLLCLPRVAANPVPAGGAGMASCPGLWQETLFPLPVGLPRLSXPFSHKKIWGQARWLTPVIPALWEAEAGSHKVRRSGPSWLIR

SEQ ID NO: 318 - protein, 234 aa, Homo sapiens
MAALLLLPLLLLLPLLLLKLHLWPQLRWLPADLAFAVRALCCKRALRARALAAAAADPEGPEGGCSLAWRLAELAQQRAAHTFLIHGSRRFSYSEAERESNRAARAFLRALGWDWGPDGGDSGEGSAGEGERAAPGAGDAAAGSGAEFAGGDGAARGGGAAALCHLEQLWRCSSPLAQSFCGSGSGWPRPACALPLCPPPCAGAPCCTASAAAARARWCWRQSFWSPWSRTCPP

SEQ ID NO: 319 - protein, 683 aa, Homo sapiens
MAALLLLPLLLLLPLLLLKLHLWPQLRWLPADLAFAVRALCCKRALRARALAAAAADPEGPEGGCSLAWRLAELAQQRAAHTFLIHGSRRFSYSEAERESNRAARAFLRALGWDWGPDGGDSGEGSAGEGERAAPGAGDAAAGSGAEFAGGDGAARGGGAAAPLSPGATVALLLPAGPEFLWLWFGLAKAGLRTAFVPTALRRGPLLHCLRSCGARALVLAPEFLESLEPDLPALRAMGLHLWAAGPGTHPAGISDLLAEVSAEVDGPVPGYLSSPQSITDTCLYIFTSGTTGLPKAARISHLKILQCQGFYQLCGVHQEDVIYLALPLYHMSGSLLGIVGCMGIGATVVLKSKFSAGQFWEDCQQHRVTVFQYIGELCRYLVNQPPSKAERGHKVRLAVGSGLRPDTWERFVRRFGPLQVLETYGLTEGNVATINYTGQRGAVGRASWLYKHIFPFSLIRYDVTTGEPIRDPQGHCMATSPGEPGLLVAPVSQQSPFLGYAGGPELAQGKLLKDVFRPGDVFFNTGDLLVCDDQGFLRFHDRTGDTFRWKGENVATTEVAEVFEALDFLQEVNVYGVTVPGHEGRAGMAALVLRPPHALDLMQLYTHVSENLPPYARPRFLRLQESLATTETFKQQKVRMANEGFDPSTLSDPLYVLDQAVGAYLPLTTARYSALLAGNLRI

SEQ ID NO: 320 - protein, 162 aa, Homo sapiens
  SITE (157): Xaa equals any of the naturally occurring L-amino acids
MGPRFTMLLAMWLVCGSEPHPHATIRGSHGGRKVPLVSPDSSRPARFLRHTGRSRGIERSTLEEPNLQPLQRRRSVPVLRLARPTEPPARSDINGAAVRPEQRPAARGSPREMIRDEGSSARSRMLRFPSGSSSPNILASFAGKNRVWVISSPHASXGYYRL

SEQ ID NO: 321 - protein, 509 aa, Homo sapiens
MTWRMGPRFTMLLAMWLVCGSEPHPHATIRGSHGGRKVPLVSPDSSRPARFLRHTGRSRGIERSTLEEPNLQPLQRRRSVPVLRLARPTEPPARSDINGAAVRPEQRPAARGSPREMIRDEGSSARSRMLRFPSGSSSPNILASFAGKNRVWVISAPHASEGYYRLMMSLLKDDVYCELAERHIQQIVLFHQAGEEGGKVRRITSEGQILEQPLDPSLIPKLMSFLKLEKGKFGMVLLKKTLQVEERYPYPVRLEAMYEVIDQGPIRRIEKIRQKGFVQKCKASGVEGQVVAEGNDGGGGAGRPSLGSEKKKEDPRRAQVPPTRESRVKVLRKLAATAPAFPQPPSTPRATTLPPAPATTVTRSTSRAVTVAARPMTTTAFPTTQRPWTPSPSHRPPTTTEVITARRPSVSENLYPPSRKDQHRERPQTTRRPSKATSLESFTNAPPTTISEPSTRAAGPGRFRDNRMDRREHGHRDPNVVPGPPKPAKEKPPKKKAQDKILSNEYEEV

SEQ ID NO: 322 - protein, 68 aa, Homo sapiens
  SITE (5): Xaa equals any of the naturally occurring L-amino acids
PPHLXSFEFLKNVQLRPDTVAHTCDPGTLGGRGWWITGSGDRDILANTVKRRLYRKCRRLAGHGGGRL

SEQ ID NO: 323 - protein, 58 aa, Homo sapiens
MPNQFWKLHILLFLLFFLFPLVQLCIFILISNKEKKNVCTLRKTYIVRHFLWLRSFQV

SEQ ID NO: 324 - protein, 58 aa, Homo sapiens
MQVFSALLYSLMHFYLPSFTLEMYLNTLLSHDLLSFFHCSGLVFFVYFKSVTGLFSGV

SEQ ID NO: 325 - protein, 1 aa, Homo sapiens
I

SEQ ID NO: 326 - protein, 7 aa, Homo sapiens
IFTCVLY

SEQ ID NO: 327 - protein, 41 aa, Homo sapiens
  SITE (16): Xaa equals any of the naturally occurring L-amino acids
QTVSAFLPPLFYVTFXLGKINYTKYHIIPSYKLLPENKSCV

SEQ ID NO: 328 - protein, 58 aa, Homo sapiens; identical to SEQ ID NO: 324

SEQ ID NO: 329 - protein, 14 aa, Homo sapiens
  SITE (7): Xaa equals any of the naturally occurring L-amino acids
MMPAYPXLLAWILF

SEQ ID NO: 330 - protein, 32 aa, Homo sapiens
AWSHLSILLNYKLQRQEWHLFTYFEFVCNCLD

SEQ ID NO: 331 - protein, 188 aa, Homo sapiens [sequence omitted]

SEQ ID NO: 332 - protein, 188 aa, Homo sapiens [sequence omitted]

SEQ ID NO: 333 - protein, 44 aa, Homo sapiens [sequence omitted]

SEQ ID NO: 334 - protein, 44 aa, Homo sapiens [sequence omitted]

SEQ ID NO: 335 - protein, 249 aa, Homo sapiens
  SITE (147): Xaa equals any of the naturally occurring L-amino acids
  SITE (150): Xaa equals any of the naturally occurring L-amino acids
  SITE (196): Xaa equals any of the naturally occurring L-amino acids
  SITE (222): Xaa equals any of the naturally occurring L-amino acids
MVCVFMCIVGVCVACCACVYCGCLLSRAVERTSGKQPQHQGQARSAECMEAGQVGAWDEGSTEMQGCQGPWNQEPMIKATVHTALEAKDIFISQGLKSMGQGWAPGQDWGYRVDQSPSLPPGAYPHPFTSQVSPPQPLGELLLIPQXVAXVTLLPEASPHPLKHPLPAAHLQHSQRAPWPVSTGLSLLGGAGAEQXPGLGVPAPRSTPSPTASLFNLRQAVXLLSLTFPLCKMREGTAPSKPSFSLKPL

SEQ ID NO: 336 - protein, 42 aa, Homo sapiens
MKIVTTLYCLFVFLLNCFGVGGSCIFLSNRTPGFSWAHDCPQ

SEQ ID NO: 337 - protein, 42 aa, Homo sapiens; identical to SEQ ID NO: 336

SEQ ID NO: 338 - protein, 42 aa, Homo sapiens; identical to SEQ ID NO: 336

SEQ ID NO: 339 - protein, 82 aa, Homo sapiens [sequence omitted]

SEQ ID NO: 340 - protein, 265 aa, Homo sapiens
  SITE (112): Xaa equals any of the naturally occurring L-amino acids
  SITE (113): Xaa equals any of the naturally occurring L-amino acids
  SITE (193): Xaa equals any of the naturally occurring L-amino acids
  SITE (222): Xaa equals any of the naturally occurring L-amino acids
  SITE (238): Xaa equals any of the naturally occurring L-amino acids
  SITE (258): Xaa equals any of the naturally occurring L-amino acids
MDLLQFLAFLFVLLLSGMGATGTLRTSLDPSLEIYKKMFEVKRREQLLALKNLAQLNDIHQQYKILDVMLKGLFKVLEDSRTVLTAADVLPDGPFPQDEKLKDAFSHVVENXXFFGDVVLRFPKIVHYYFDHNSNWNLLIRWGISFCNQTGVFNQGPHSPILSLMAQELGISEKDSNFQNPFKIDRTEFIPSXDPFQKALREEEKRRKKEEKRKEIRKGPKXLPDSHLELLGPWSSFXVQGATRRQVREGRRGWSFGXWLEEAPF

SEQ ID NO: 341 - protein, 229 aa, Homo sapiens
MDLLQFLAFLFVLLLSGMGATGTLRTSLDPSLEIYKKMFEVKRREQLLALKNLAQLNDIHQQYKILDVMLKGLFKVLEDSRTVLTAADVLPDGPCPQDEKLKDAFSHVVENTAFFGDVVLRFPRIVHYYFDHNSNWNLLIRWGISFCNQTGVFNQGPHSPILSLMAQELGISEKDSNFQNPFKIDRTEFIPSTDPFQKALREEEKRRKKEEKRKEIRKGPRISRSQSEL

SEQ ID NO: 342 - protein, 88 aa, Homo sapiens
  SITE (1): Xaa equals any of the naturally occurring L-amino acids
  SITE (2): Xaa equals any of the naturally occurring L-amino acids
  SITE (19): Xaa equals any of the naturally occurring L-amino acids
XXEDRLPGPILPRGFQLWXSLGGEFPRLQIRPMCHAPNCLSVRPSVRPSVHPSIHPSIPVTISTPMCQMPYISNLMQVPPPPCPLLIQ

SEQ ID NO: 343 - protein, 162 aa, Homo sapiens
  SITE (138): Xaa equals any of the naturally occurring L-amino acids
  SITE (152): Xaa equals any of the naturally occurring L-amino acids
MRPRGLPPLLVVLLGCWASVSAQTDATPAVTTEGLNSTEAALATFGTFPSTRPPGTPRAPGPSSGPRPTPVTDVAVLCVCDLSPAQCDINCCCDPDCSSVDFSVFSACSVPVVTGDSQFCSQKAVIYSLNFTANPPQXVFELVDQINPSIFXIHITNCRCSV

SEQ ID NO: 344 - protein, 274 aa, Homo sapiens
  SITE (56): Xaa equals any of the naturally occurring L-amino acids
PFYSSPEILRVPDSRKKVPITVQSIVIQSLNKTLTRREDTDVLQPTLVNAGHFSLXVNVVLEVKYSLTYTDAGEVTKADLSFVLGTVSSVVVPLQQKFEIHFLQENTQPVPLSGNPGYVVGLPLAAGFQPHKGGALPCQLVAQKVKSLLWGQGFPDYVAPFGNSQAQDMLDWVPIHFITQSFNRKDSCQLPGALVIEVKWTKYGSLLNPQAKIVNVTANLISSSFPEANSGNERTILISTAVTFVDVSAPAEAGFRAPPAINARLPFNFFFPFV

SEQ ID NO: 345 - protein, 254 aa, Homo sapiens
  SITE (5): Xaa equals any of the naturally occurring L-amino acids
  SITE (15): Xaa equals any of the naturally occurring L-amino acids
  SITE (17): Xaa equals any of the naturally occurring L-amino acids
  SITE (24): Xaa equals any of the naturally occurring L-amino acids
THLFXCNSYYKPLTXHXPFIIQKXPDENNFDTLMKTSDGFTLNAESYVSFTTKLDIPTAAKYEYGVPLQTSDSFLRFPSSLTSSLCTDNNPAAFLVNQAVKCTRKINLEQCEEIEALSMAFYSSPEILRVPDSRKKVPITVQSIVIQSLNKTLTRREDTDVLQPTLVNAGHFSLCVNVVLEDSCQLPGALVIEVKWTKYGSLLNPQAKIVNVTANLISSSFPENAQMHQFLNIHVKFENCTFGEIKFYIQLAKK

SEQ ID NO: 346 - protein, 587 aa, Homo sapiens
MRPRGLPPLLVVLLGCWASVSAQTDATPAVTTEGLNSTEAALATFGTFPSTRPPGTPRAPGPSSGPRPTPVTDVAVLCVCDLSPAQCDINCCCDPDCSSVDFSVFSACSVPVVTGDSQFCSQKAVIYSLNFTANPPQRVFELVDQINPSIFCIHITNYKPALSFINPEVPDENNFDTLMKTSDGFTLNAESYVSFTTKLDIPTAAKYEYGVPLQTSDSFLRFPSSLTSSLCTDNNPAAFLVNQAVKCTRKINLEQCEEIEALSMAFYSSPEILRVPDSRKKVPITVQSIVIQSLNKTLTRREDTDVLQPTLVNAGHFSLCVNVVLEVKYSLTYTDAGEVTKADLSFVLGTVSSVVVPLQQKFEIHFLQENTQPVPLSGNPGYVVGLPLAAGFQPHKGSGIIQTTNRYGQLTILHSTTEQDCLALEGVRTPVLFGYTMQSGCKLRLTGALPCQLVAQKVKSLLWGQGFPDYVAPFGNSQAQDMLDWVPIHFITQSFNRKDSCQLPGALVIEVKWTKYGSLLNPQAKIVNVTANLISSSFPEANSGNERTILISTAVTFVDVSAPAEAGFRAPPAINARLPFNFFFPFV

SEQ ID NO: 347 - protein, 184 aa, Homo sapiens
MKALGAVLLALLLCGRPGRGQTQQEEEEEDEDHGPDDYDEEDEDEVEEEETNRLPGGRSRVLLRCYTCKSLPRDERCNLTQNCSHGQTCTTLIAHGNTESGLLTTHSTWCTDSCQPITKTVEGTQVTMTCCQSSLCNVPPWQSSRVQDPTGKGAGGPRGSSETVGAALLLNLLAGLGAMGARRP

SEQ ID NO: 348 - protein, 108 aa, Homo sapiens
  SITE (19): Xaa equals any of the naturally occurring L-amino acids
  SITE (21): Xaa equals any of the naturally occurring L-amino acids
  SITE (29): Xaa equals any of the naturally occurring L-amino acids
  SITE (87): Xaa equals any of the naturally occurring L-amino acids
MFSLSWQLSLVTFMGFPIXMXVSNIYGKXYKRLSKEVQNALARASNTAEETISAMKTVRSFANEEEEAEVYLRKLQQVYKLNRKEAXAYMYYVWGSGLTLLVVQVSIL

SEQ ID NO: 349 - protein, 219 aa, Homo sapiens
VTILCIDLGTDMVPAISLAYEQAESDIMKRQPRNPKTDKLVNERLISMAYGQIGMIQALGGFFTYFVILAENGFLPIHLLGLRVDWDDRWINDVEDSYGQQWTYEQRKIVEFTCHTAFFVSIVVVQWADLVICKTRRNSVFQQGMKNKILIFGLFEETALAAFLSYCPGMGVALRMYPLKPTWWFCAFPYSLLIFVYDEVRKLIIRRRPGGWVEKETYY

SEQ ID NO: 350 - protein, 73 aa, Homo sapiens
FSSSMSLSFLPFLPFLSPCSETAAGSYLSRPTPFPMVAVLSAGAGSCRWRIREKSTEQLPAERAGPGEPSGGS

SEQ ID NO: 351 - protein, 296 aa, Homo sapiens
MFSLSWQLSLVTFMGFPIIMMVSNIYGKYYKRLSKEVQNALARASNTAEETISAMKTVRSFANEEEEAEVYLRKLQQVYKLNRKEAAAYMYYVWGSGLTLLVVQVSILYYGGHLVISGQMTSGNLIAFIIYEFVLGDCMENVSFSLSPGKVTALVGPSGSGKSSCVNILENFYPLEGGRVLLDGKPISAYDHKYLHRVISLVSQEPVLFARSITDNISYGLPTVPFEMVVEAAQKANAHGFIMELQDGYSTETGEKGAQLSGGQKQRVAWPGLWCGTPQSSSWMKPPALWMPRASI

SEQ ID NO: 352 - protein, 446 aa, Homo sapiens
MFSLSWQLSLVTFMGFPIIMMVSNIYGKYYKRLSKEVQNALARASNTAEETISAMKTVRSFANEEEEAEVYLRKLQQVYKLNRKEAAAYMYYVWGSGLTLLVVQVSILYYGGHLVISGQMTSGNLIAFIIYEFVLGDCMESVGSVYSGLMQGVGAAEKVFEFIDRQPTMVHDGSLAPDHLEGRVDFENVTFTYRTRPHTQVLQNVSFSLSPGKVTALVGPSGSGKSSCVNILENFYPLEGGRVLLDGKPISAYDHKYLHRVISLVSQEPVLFARSITDNISYGLPTVPFEMVVEAAQKANAHGFIMELQDGYSTETGEKGAQLSGGQKQRVAMARALVRNPPVLILDEATSALDAESEYLIQQAIHGNLQKHTVLIIAHRLSTVEHAHLIVVLDKGRVVQQGTHQQLLAQGGLYAKLVQRQMLGLQPAADFTAGHNEPVANGSHKA

SEQ ID NO: 353 - protein, 35 aa, Homo sapiens
KFKQVIKSFYKIHLAKEILSMNIKLRKVLYVFLVN

SEQ ID NO: 354 - protein, 27 aa, Homo sapiens
MAIFCFSLCSLGSILGKGMSTFGSISV

SEQ ID NO: 355 - protein, 99 aa, Homo sapiens [sequence omitted]

SEQ ID NO: 356 - protein, 99 aa, Homo sapiens [sequence omitted]

SEQ ID NO: 357 - protein, 99 aa, Homo sapiens
  SITE (75): Xaa equals any of the naturally occurring L-amino acids
MGRVSIQQLGVLVALPVPLLLLGCGSALHPGAPRSIPHTMPSTREVGQTRPGPCQPSVPRFSHWLHRMVAFSLPXSQSCSEGAWRSTLSHQGQLETKAI

SEQ ID NO: 358 - protein, 67 aa, Homo sapiens
PIPWLCPPSPTLPLLSIFFLPTHPPPPSRRGGLGRPRPSLEKPSLSSAVVPPPNPITAAHPILTVIL

SEQ ID NO: 359 - protein, 4 aa, Homo sapiens
APRG

SEQ ID NO: 360 - protein, 71 aa, Homo sapiens
MQNRSPAFCFLLMYLLCTCVTRVLLSIIFNLIRAYLWSWHDVTPCVRVGITPVYLFLSSAAHNARHIVGTL

SEQ ID NO: 361 - protein, 71 aa, Homo sapiens; identical to SEQ ID NO: 360

SEQ ID NO: 362 - protein, 51 aa, Homo sapiens [sequence omitted]

SEQ ID NO: 363 - protein, 51 aa, Homo sapiens [sequence omitted]

SEQ ID NO: 364 - protein, 53 aa, Homo sapiens
  SITE (41): Xaa equals any of the naturally occurring L-amino acids
SCFLALKSILAVCGGSHLPPALWEASGGGLVPNSCSPGDPXVLERPPPRWSSS

SEQ ID NO: 365 - protein, 110 aa, Homo sapiens
  SITE (97): Xaa equals any of the naturally occurring L-amino acids
MDNRFATAFVIACVLSLISTIYMAASIGTDFWYEYRSPVQENSSDLNKSIWDEFISDEADEKTYNDALFRYNGTVGLWRRCITIPKNMHWYSPPERXESFDVVTKCVSSH

SEQ ID NO: 366 - protein, 165 aa, Homo sapiens
  SITE (2): Xaa equals any of the naturally occurring L-amino acids
  SITE (4): Xaa equals any of the naturally occurring L-amino acids
  SITE (5): Xaa equals any of the naturally occurring L-amino acids
  SITE (148): Xaa equals any of the naturally occurring L-amino acids
RXTXXHFARTYPGIHLRIGSDWKNACAMLKDGTAGSHFMASPQCVGYSRSTAAPLTMTMCLPDLKEIQRAVKLWVRSLDAQSVYVATDSESYVPELQQLFKGKVKVVSLKPEVAQVDLYILGQADHFIGNCVSSFTAFVKRERDLQGXPSSFFGMDRPPKLRDEF

SEQ ID NO: 367 - protein, 177 aa, Homo sapiens
LVLWTRFYRGDMSLHSSPTLPTSLYQSCDLSVGGPSLLTWVWRRERRCCKVFSVSHCLEAGPAKAWAHSCTGSPRGRTGWGSRACEALGKGMGLWGRGGMGFRSICTIRKVLRSFFLEGTLSSLSLFLDLGLELRMGRCAQGGTHQSTREGGYLGVSQGLCQCLQPTSRSLEFGEWG

SEQ ID NO: 368 - protein, 184 aa, Homo sapiens
MDNRFATAFVIACVLSLISTIYMAASIGTDFWYEYRSPVQENSSDLNKSIWDEFISDEADEKTYNDALFRYNGTVGLWRRCITIPKNMHWYSPPERTESFDVVTKCVSFTLTEQFMEKFVDPGNHNSGIDLLRTYLWRCQFLLPFVSLGLMCFGALIGLCACICRSLYPTIATGILHLLADTML

SEQ ID NO: 369 - protein, 211 aa, Homo sapiens
  SITE (64): Xaa equals any of the naturally occurring L-amino acids
  SITE (113): Xaa equals any of the naturally occurring L-amino acids
STHASGRTCALPAAATPRRVGAAAPGCAQGRATDGARRAELRREPAVVAHRHGHAGAHQGGAQXAAQPHRRLQVPQAQAGAHLAPGRESEDPQESEHGAGVHGEPAARAGGAXQAESPQPRQQRLPAAAPAPGARVLSPRAGRMRGHPPQGAGSRGGVVGAPDLERVRPWGPPLPECAQELREGAAPGDSPPPRVPRTRQAGPPAPGGASA

SEQ ID NO: 370 - protein, 225 aa, Homo sapiens
  SITE (11): Xaa equals any of the naturally occurring L-amino acids
  SITE (112): Xaa equals any of the naturally occurring L-amino acids
  SITE (166): Xaa equals any of the naturally occurring L-amino acids
RPDLERVRPWXPPLPECAQELREGAAPGIPPRGCPGLGRGAPDSTSWTPCSRGGERMTPPPSRCLFPPRGRPVLHKPARLGCPFVHRAGKGAPRGRSSKPCLSFTFTFFFFXFGREKNRVFDSALFMFLLGNKRWLCVCVFSCVGFLKKWEEEKKILRPFPRSRSXLRFFRPVPPPFFVLFCFVLLRVHIPVCNPWFARFSVFSKVSLRQKPRAEFLGLEGQNFP

SEQ ID NO: 371 - protein, 68 aa, Homo sapiens [sequence omitted]

SEQ ID NO: 372 - protein, 62 aa, Homo sapiens
VIPFYIHYFVYFNCFILVTLPFKIFKLPIVRCQWEWTPDGQIYKWQWLDQTRTLEDGRVGAK

SEQ ID NO: 373 - protein, 29 aa, Homo sapiens
  SITE (11): Xaa equals any of the naturally occurring L-amino acids
  SITE (13): Xaa equals any of the naturally occurring L-amino acids
IPLWFISVSFXMXRFTILNQYHVTCRCQN

SEQ ID NO: 374 - protein, 68 aa, Homo sapiens [sequence omitted]

SEQ ID NO: 375 - protein, 57 aa, Homo sapiens
  SITE (42): Xaa equals any of the naturally occurring L-amino acids
  SITE (44): Xaa equals any of the naturally occurring L-amino acids
LLSAMLPGENEIVAWINESVCVARSGLALDVDGAPALSPQLXSXKISNLEENGRTVE

SEQ ID NO: 376 - protein, 43 aa, Homo sapiens [sequence omitted]

SEQ ID NO: 377 - protein, 24 aa, Homo sapiens
SACFCCAASSLFSSFSIVSPLWKK

SEQ ID NO: 378 - protein, 477 aa, Homo sapiens
  SITE (49): Xaa equals any of the naturally occurring L-amino acids
  SITE (57): Xaa equals any of the naturally occurring L-amino acids
  SITE (105): Xaa equals any of the naturally occurring L-amino acids
  SITE (109): Xaa equals any of the naturally occurring L-amino acids
  SITE (152): Xaa equals any of the naturally occurring L-amino acids
  SITE (194): Xaa equals any of the naturally occurring L-amino acids
  SITE (197): Xaa equals any of the naturally occurring L-amino acids
  SITE (198): Xaa equals any of the naturally occurring L-amino acids
  SITE (203): Xaa equals any of the naturally occurring L-amino acids
  SITE (459): Xaa equals any of the naturally occurring L-amino acids
  SITE (463): Xaa equals any of the naturally occurring L-amino acids
  SITE (468): Xaa equals any of the naturally occurring L-amino acids
MVNACWCGLLAALSLLLDASTDEAATENILKAELTMAALCGKLGLVTSXNAFITAIXKGSLPPHYALTVLNTTTAATLSNKSYSVQGQSVMMISPSSESHQQVVXVGQXLAVQPQGTVMLTSKNIQCMRTLLNLAHCHGAVLGTSWQLVLAXLQHLVWILGLKPSSGGALKPGRAVEGPSTVLTTAVMTDLPVXSNXXSRLFXSSQYLDDVSLHHLINALCSLSLEAMDMAYGNNKEPSLFAVAKLLETGLVNMHRIEILWRPLTGHLLEVCQHPNSRMREWGAEALTSLIKAGLTFNHDPPLSQNQRLQLLLLNPLKEMSNINHPDIRLKQLECVLQILQSQGDSLGPGWPLVLGVMGAIRNDQGESLIRTAFQCLQLVVTDFLPTMPCTCLQIVVDVAGSFGLHNQELNISLTSIGLLWNISDYFFQRGETIEKELNKEEAAQQKQAEEKGVGLNRXFHPXPAFDXWGYALCKIG

SEQ ID NO: 379 - protein, 29 aa, Homo sapiens
NSQYFTTNIALMFLFKKKKVYGCLHLSTV

SEQ ID NO: 380 - protein, 70 aa, Homo sapiens [sequence omitted]

SEQ ID NO: 381 - protein, 67 aa, Homo sapiens [sequence omitted]

SEQ ID NO: 382 - protein, 79 aa, Homo sapiens
  SITE (23): Xaa equals any of the naturally occurring L-amino acids
  SITE (45): Xaa equals any of the naturally occurring L-amino acids
MGCCSKKYWQLLLGAAPWGVIPXLLLWMGTRAPHFKDSVSQGLPXKAEESRANFNQFLVLLMPKEMIVLTIVHPIVRRA

SEQ ID NO: 383 - protein, 39 aa, Homo sapiens
MFLVSPSVSSVVSSLLSIFWLMHLGQVWLGSMETHPITS

SEQ ID NO: 384 - protein, 39 aa, Homo sapiens; identical to SEQ ID NO: 383

SEQ ID NO: 385 - protein, 39 aa, Homo sapiens; identical to SEQ ID NO: 383

SEQ ID NO: 386 - protein, 198 aa, Homo sapiens
  SITE (9): Xaa equals any of the naturally occurring L-amino acids
  SITE (12): Xaa equals any of the naturally occurring L-amino acids
  SITE (97): Xaa equals any of the naturally occurring L-amino acids
  SITE (164): Xaa equals any of the naturally occurring L-amino acids
  SITE (196): Xaa equals any of the naturally occurring L-amino acids
PDPNARRGXNAXSTRTDHEHRTYRLYRRPSRFRDSPAQRPYPAAGYVETVARAHEAAGFDRALVAFHSNSPDSTLIAAHAASVTQKLQFLIAHRPGXAQPTLAARQFATLDVFNGGRTAVHIITGGDDRELRADGSHIGKDERYARTDEYLSVVRQEWTHEQPXDFKGTYYQVEGAHSTVKSPQQPHIPLYFGGSXRG

SEQ ID NO: 387 - protein, 34 aa, Homo sapiens
ELGRLRHPTQGKPACHIECTALIKFTHDNSAFYN

SEQ ID NO: 388 - protein, 207 aa, Homo sapiens
  SITE (105): Xaa equals any of the naturally occurring L-amino acids
  SITE (110): Xaa equals any of the naturally occurring L-amino acids
  SITE (111): Xaa equals any of the naturally occurring L-amino acids
  SITE (116): Xaa equals any of the naturally occurring L-amino acids
  SITE (129): Xaa equals any of the naturally occurring L-amino acids
  SITE (133): Xaa equals any of the naturally occurring L-amino acids
MRPWRFGWPRTLASQLSLIFLISLVCAHGLSFSAQFYERYISARTVMLGNLENDVSTSVAILDRLPANERAIGWRVLRPAELPVLLNAGEAGEPMTSNDVPMAAXFDCGXXGRALXPDLSRYSRHPETXPGAXDPGRWQPDHPRRTPRRPARSLLVAGGAGAATGAAARLHLGRGAPGRAPADTPGPCGRNPRPERSPHTPGRNRPE

SEQ ID NO: 389 - protein, 18 aa, Homo sapiens
  SITE (15): Xaa equals any of the naturally occurring L-amino acids
  SITE (17): Xaa equals any of the naturally occurring L-amino acids
GWPRWRRERCANTPXVXL

SEQ ID NO: 390 - protein, 435 aa, Homo sapiens
MRPWRFGWPRTLASQLSLIFLISLVCAHGLSFSAQFYERYISARTVMLGNLENDVSTSVAILDRLPANERASWLARLDRQNYRYLLNAGEAGEPMTSNDVPMAATSIADALGEHYALTFRDIPGIQKHFQVHLTLADGNPITLDVRPAALPVAYWLPVVLVLQLALLLGCTWVAVRLAVRPLTRLARAVETLDPNAHPTPLDETGPSEVAHAAAAFNAMQQRIAEYLKERMQILAAISHDLQTPITRMKLRAEFMDDSADREKLWSDLSEMEHLVREGVAYARSVHGATEASHRIDLDAFLDSLVFDYQDMQKQVSLRGKSALILDTRPHALRRVLVNLVDNALKFAGNAELEVGSTANGQLSIKVLDQGPGIAEDELAQVLQPFYRVESSRNRGTGGTGLGLAIAQQLAVAIGGTLTLSNRVEGGLCAEIRLSL

SEQ ID NO: 391 - protein, 34 aa, Homo sapiens
CKWVQNGGHPNVESSKYHCHEPKASLYTLEESTL

SEQ ID NO: 392 - protein, 28 aa, Homo sapiens
LLLCKFKKVNYFLKVLISNFSIWAYDHH

SEQ ID NO: 393 - protein, 36 aa, Homo sapiens
MAGHPTLILLCKWAFHLTGAICEPYLNQTLPTQACL

SEQ ID NO: 394 - protein, 36 aa, Homo sapiens; identical to SEQ ID NO: 393

SEQ ID NO: 395 - protein, 41 aa, Homo sapiens
  SITE (15): Xaa equals any of the naturally occurring L-amino acids
MWLMLILSLTSGETXALRGCCSSSWTYGESAAGPADQAPCL

SEQ ID NO: 396 - protein, 41 aa, Homo sapiens
MWLMLILSLTSGETEALRGCCSSSWTYGESAAGPADQAPCL

SEQ ID NO: 397 - protein, 20 aa, Homo sapiens
IFALSLSFYTCIHIHTHRHT

SEQ ID NO: 398 - protein, 117 aa, Homo sapiens [sequence omitted]

SEQ ID NO: 399 - protein, 183 aa, Homo sapiens [sequence omitted]

SEQ ID NO: 400 - protein, 38 aa, Homo sapiens
MVSKHSLNLHFFYWKGGCACFTSEPRVFVVVELSLLDC

SEQ ID NO: 401 - protein, 38 aa, Homo sapiens; identical to SEQ ID NO: 400

SEQ ID NO: 402 - protein, 92 aa, Homo sapiens
  SITE (10): Xaa equals any of the naturally occurring L-amino acids
  SITE (49): Xaa equals any of the naturally occurring L-amino acids
IGPLLVYVSXTHESLKLWQLKETLIQSFPALVRSLGPGLLFGPPIATGXTQAGDMADKSQAGPRGSVSSVAWGPFPGGSGALAFCPLILRSH

SEQ ID NO: 403 - protein, 24 aa, Homo sapiens
MHIFTILYPISEGFFKIFNFIVFF

SEQ ID NO: 404 - protein, 69 aa, Homo sapiens
  SITE (1): Xaa equals any of the naturally occurring L-amino acids
XSGDLPTSAFPKCWDYRPEPPCPAQAQTSVLCVTSWSRLTVSTLTSTSQAEGVRALPIWPSSQVCSIQP

SEQ ID NO: 405 - protein, 110 aa, Homo sapiens [sequence omitted]

SEQ ID NO: 406 - protein, 79 aa, Homo sapiens
  SITE (67): Xaa equals any of the naturally occurring L-amino acids
MVFFQIQSLLSFLASSLSIIFLLPRCLIPPANGTAGSSCSEFQTLHTFHPQASCAHAGPSNLYTFLXLFDLSAKVSPLM

SEQ ID NO: 407 - protein, 79 aa, Homo sapiens
MVFFQIQSLLSFLASSLSIIFLLPRCLIPPANGTAGSSCSEFQTLHTFHPQASCAHAGPSNLYTFLRLFDLSAKVSPLM

SEQ ID NO: 408 - protein, 325 aa, Homo sapiens
  SITE (10): Xaa equals any of the naturally occurring L-amino acids
  SITE (136): Xaa equals any of the naturally occurring L-amino acids
  SITE (186): Xaa equals any of the naturally occurring L-amino acids
  SITE (234): Xaa equals any of the naturally occurring L-amino acids
VPPAVCPAGXFCQNQCFTKRQYPETKIIKTDGKGWGLVAKRDIRKGEFVNEYVGELIDEEECMARIKHAHENDITHFYMLTIDKDRIIDAGPKGNYSRFMNHSCQPNCETLKWTVNGDTRVGLFAVCDIPAGTELXFNYNLDCLGNEKTVCRCGASNCSGFLGDRPKTSTTLSSEEKGKKTKKKTXRRRAKGEGKRQSEDECFRCGDGGQLVLCDRKFCTKAYHLSCLGLGKRXFGKWECPWHHCDVCGKPSTSFCHLCPNSFCKEHQDGTAFSCTPDGRSYCCEHDLGAASVRSTKTEKPPPEPGKPKGKRRRRRGWRRVTEGK

SEQ ID NO: 409 - protein, 161 aa, Homo sapiens
  SITE (123): Xaa equals any of the naturally occurring L-amino acids
  SITE (129): Xaa equals any of the naturally occurring L-amino acids
  SITE (145): Xaa equals any of the naturally occurring L-amino acids
  SITE (146): Xaa equals any of the naturally occurring L-amino acids
  SITE (157): Xaa equals any of the naturally occurring L-amino acids
MTTWSCLVAMIVSGVITAVWAVRAAPIWRSQVKQKMRIGKQGNCRPPRCICSALGLLAPWMAVVLSQLSVRCVVSWVQGKPSSPRPRGSAASPAPGATPPTPRKPVSWLGYRENHRPKKPKSXTRCLVXQNWSLPPISKDRTAGXXDTNRTRRSGLXLRLG

SEQ ID NO: 410 - protein, 57 aa, Homo sapiens
RPVSTKKKKVSWAWWCTSIAPATLEAKVRGLLEPGRSVSAVSCDPANALSLGSVRPC

SEQ ID NO: 411 - protein, 58 aa, Homo sapiens
VLCLQIYCQTRFSSSLSTSFTVLNCMYRSVILSELTFVKDKRSVLDRYFPFACGCPAP

SEQ ID NO: 412 - protein, 141 aa, Homo sapiens
MKSTLSIFSLWVMIFVLCLQIYCQTRFSSSLSTSFTVLNCMYRSVILSELTFVKDKRSVLDRLFFLLHVVVQHHEDSSFSTELSLYFCQRSDLPLKSLSNLSTSHHLHFQSLRTRGRTRGSTREFRTGTCRRTSFPYSESY

SEQ ID NO: 413 - protein, 141 aa, Homo sapiens [sequence omitted]

SEQ ID NO: 414 - protein, 57 aa, Homo sapiens
MLETLSQFISILFVLLWIISDLILCFLKCGNPGTLDMVLPIWTNQYIHSSRSILSFI

SEQ ID NO: 415 - protein, 57 aa, Homo sapiens [sequence omitted]

SEQ ID NO: 416 - protein, 85 aa, Homo sapiens
  SITE (14): Xaa equals any of the naturally occurring L-amino acids
  SITE (59): Xaa equals any of the naturally occurring L-amino acids
  SITE (68): Xaa equals any of the naturally occurring L-amino acids
LLFLLGMAWFNDWXAALYMPAFCAILVALFAFAMMRDTPQSCGLPPIEEYKNDYPDDYXEKAEQELTXKQPGGRRLWLHPAYTAA

SEQ ID NO: 417 - protein, 66 aa, Homo sapiens
MLFMGFVPWATSSIAVMFVLLFLCGWFQGMGWPPCGRTMVHWWSQKERGGIVSVWNCAHNVGGWVF

SEQ ID NO: 418 - protein, 152 aa, Homo sapiens
MLFMGFVPWATSSIAVMFVLLFLCGWFQGMGWPPCGRTMVHWWSQKERGGIVSVWNCAHNVGGGIPPLLFLLGMAWFNDWHAALYMPAFCAILVALFAFAMMRDTPQSCGLPPIEEYKNDYPDDYNEKAEQELTAKQPGGRRLWLHPAYTAA

SEQ ID NO: 419 - protein, 85 aa, Homo sapiens [sequence omitted]

SEQ ID NO: 420 - protein, 85 aa, Homo sapiens [sequence omitted]

SEQ ID NO: 421 - protein, 64 aa, Homo sapiens
MWETYIWLVLTFAQKACCMKLTATMLKQIHIKKCRSIQWLLRVNSFMESSMSLSSKIRPHQRRN

SEQ ID NO: 422 - protein, 64 aa, Homo sapiens; identical to SEQ ID NO: 421

SEQ ID NO: 423 - protein, 47 aa, Homo sapiens
SQLLRKLRWEDGLSLGGRVCSEPRLHHCTPAWVIGPGLVLTTTTEKK

SEQ ID NO: 424 - protein, 54 aa, Homo sapiens
  SITE (4): Xaa equals any of the naturally occurring L-amino acids
  SITE (23): Xaa equals any of the naturally occurring L-amino acids
IETXRFGGKQMELQEIKSIISSXMWWLMPLILVTQEAEAGGSLEARSLRPPWAT

SEQ ID NO: 425 - protein, 199 aa, Homo sapiens
  SITE (195): Xaa equals any of the naturally occurring L-amino acids
KAGTPAGTGPEFPGRPTRPIYIRRYVFKLGVLGWGAPALLVLLSLSVKSSVYGPCTIPVFDSWENGTGFQNMSICWVRSPVVHSVLVMGYGGLTSLFNLVVLAWALWTLRRLRERADAPSVRACHDTVTVLGLTVLLGTTWALAFFSFGVFLLPQLFLFTILNSLYGFFLFLWFCSQRCRSEAEAKAQIEAFSSXQTTQ

SEQ ID NO: 426 - protein, 160 aa, Homo sapiens
  SITE (133): Xaa equals any of the naturally occurring L-amino acids
  SITE (146): Xaa equals any of the naturally occurring L-amino acids
MSSLASWWPSYGRTQMNSRASVAGPSWLFCSAPFPHCLSYRSHCSSSCLTRPPGAWQRCASTSCWGPWSSRSWPRGPLGPTPRPSWSGWPDGGGAAWRWMCSPSARSATRPRWSLGPPGSSWLGGSCRAEAWXRLPGAGLCHCTPXTHGRTWLAATLCWT

SEQ ID NO: 427 - protein, 13 aa, Homo sapiens
WPSSSRTLSSSRR

SEQ ID NO: 428 - protein, 47 aa, Homo sapiens
ILKSEPKLVSFINILGKEERKKEGGRERKKERKKERKKERKKKKKNS

SEQ ID NO: 429 - protein, 80 aa, Homo sapiens
MSLIWRDVYLYGCGCICHGRCCAGFPQHSRHVWRTNAGLILPGNRVPFCELEGCTRRSSYWNHLVILGGHWGLHLPCTSL

SEQ ID NO: 430 - protein, 80 aa, Homo sapiens; identical to SEQ ID NO: 429

SEQ ID NO: 431 - protein, 107 aa, Homo sapiens
  SITE (7): Xaa equals any of the naturally occurring L-amino acids
  SITE (13): Xaa equals any of the naturally occurring L-amino acids
  SITE (17): Xaa equals any of the naturally occurring L-amino acids
LGKVGNXCRYRSXIPGXTHASGLESTFELPEEFRFLLVSFVFQTHEMATDDKTSPTLDSANDLPRSPTSSSHLTHFKPLTPDQDEPPFKSAYSSFVNLFRFNKGKTY

SEQ ID NO: 432 - protein, 46 aa, Homo sapiens
MCCRAISGCCGTCLACLCSTASGAPQPWPCSRQSTWRLIPRPSAPT

SEQ ID NO: 433 - protein, 43 aa, Homo sapiens
  SITE (5): Xaa equals any of the naturally occurring L-amino acids
  SITE (35): Xaa equals any of the naturally occurring L-amino acids
  SITE (36): Xaa equals any of the naturally occurring L-amino acids
SGFVXAWSILTPGCISPAGEKCRGGKQSLGTNYFXXVLLATDS

SEQ ID NO: 434 - protein, 76 aa, Homo sapiens
  SITE (73): Xaa equals any of the naturally occurring L-amino acids
MHLPLSTKGILPRILLLFIKTLFAFLLSDQCKGLAHLWLRRRECGPGGLTCAAEELKSYTSIFAPKLGVVGGXEMK

SEQ ID NO: 435 - protein, 38 aa, Homo sapiens
  SITE (12): Xaa equals any of the naturally occurring L-amino acids
  SITE (14): Xaa equals any of the naturally occurring L-amino acids
  SITE (38): Xaa equals any of the naturally occurring L-amino acids
PISTKNRKISRXWXCVPVIPATREAEAGESLEPRRWRX

SEQ ID NO: 436 - protein, 74 aa, Homo sapiens
LYGKSKTEVKISPVSNLHSFRLQGVSLYVEAGSLVEFQGSKRGTNICRFCLLWGNSFNHQENSSIGFICSGLPR

SEQ ID NO: 437 - protein, 58 aa, Homo sapiens
MAWSRAAWTVMRSLLICWLVSAYILATVTDVQGSHIGIPGSLLELRHHPRSNESESAC

SEQ ID NO: 438 - protein, 58 aa, Homo sapiens; identical to SEQ ID NO: 437

SEQ ID NO: 439 - protein, 14 aa, Homo sapiens
WRRQARVESLLPML

SEQ ID NO: 440 - protein, 60 aa, Homo sapiens
MWDLSPSTLSLLLLLSPCDVPALALPSAMSKSLLSLLRSRCCHASWTACRTVNQLNLFSL

SEQ ID NO: 441 - protein, 6 aa, Homo sapiens
PCDVHF

SEQ ID NO: 442 - protein, 60 aa, Homo sapiens; identical to SEQ ID NO: 440

SEQ ID NO: 443 - protein, 52 aa, Homo sapiens
MVEHLHLTYHYLKLPCIFACLLLYWFSPLLNSKLQDSRDLVCFLNQWHTVCA

SEQ ID NO: 444 - protein, 8 aa, Homo sapiens
PCCFLCLV

SEQ ID NO: 445 - protein, 87 aa, Homo sapiens
PCCFLCLVCSSSDSHKASSSSSPTLSTPLPCLFSSHTSLLRNFHIASLLLTPPQAPQGWAFPASLTAAALVPGPVPGTQLVARMLIT

SEQ ID NO: 446 - protein, 52 aa, Homo sapiens; identical to SEQ ID NO: 443

SEQ ID NO: 447 - protein, 31 aa, Homo sapiens
MPLSRFWLLLLFLPSHISVLSLIRYPSVKEY

SEQ ID NO: 448 - protein, 31 aa, Homo sapiens; identical to SEQ ID NO: 447

SEQ ID NO: 449 - protein, 43 aa, Homo sapiens
VGASTAHGLLLPLLHIHGGSANSSAPHHPNPWPQADRAWSHYL

SEQ ID NO: 450 - protein, 43 aa, Homo sapiens; identical to SEQ ID NO: 449

SEQ ID NO: 451 - protein, 26 aa, Homo sapiens
  SITE (9): Xaa equals any of the naturally occurring L-amino acids
QFKQYRYAXGMLRGPHIPVSYPNMYF

SEQ ID NO: 452 - protein, 62 aa, Homo sapiens
  SITE (58): Xaa equals any of the naturally occurring L-amino acids
  SITE (62): Xaa equals any of the naturally occurring L-amino acids
MHFAAPFQLQSQTFRYEVGSVRKSQQVLKAVVTALLIPAFSSLSSKACKASFGKKKKXKGKX

SEQ ID NO: 453 - protein, 58 aa, Homo sapiens
  SITE (37): Xaa equals any of the naturally occurring L-amino acids
  SITE (40): Xaa equals any of the naturally occurring L-amino acids
  SITE (47): Xaa equals any of the naturally occurring L-amino acids
EQLLESSLSSTSCETLSSYASGRWLLSPHTPACRVRXYIXGTDRMWXPRSMPSATDIA

SEQ ID NO: 454 - protein, 64 aa, Homo sapiens
MSATHPVPWSVTTWCFFCTWNATCSAGPSPGHRVSSSTASFIRVSYFPSYFSSPLSVTCVPVSS

SEQ ID NO: 455 - protein, 318 aa, Homo sapiens
EAKAQFWLLHSYLFCHSSNVPDLLRPRMTNDSEGKMGFKHPKIMGNFRGHALPGTFFFIIGLWWCTKSILKYICKKQKRTCYLGSKTLFYRLEILEGITIVGMALTGMAGEQFIPGGPHLMLYDYKQGHWNQLLGWHHFTMYFFFGLLGVADILCFTISSLPVSLTKLMLSNALFVEAFIFYNHTHGREMLDIFVHQLLVLVVFLTGLVAFLEFLVRNNVLLELLRSSLILLQGSWFFQIGFVLYPPSGGPAWDLMDHENILFLTICFCWHYAVTIVIVGMNYAFITWLVKSRLKRLCSSEVGLLKNAEREQESEEEM

SEQ ID NO: 456 - protein, 24 aa, Homo sapiens
  SITE (2): Xaa equals any of the naturally occurring L-amino acids
LXKLKMFYKFAFKFSYEAICKLHT

SEQ ID NO: 457 - protein, 19 aa, Homo sapiens
MVSILYLGLFFLNSSVLYA

SEQ ID NO: 458 - protein, 282 aa, Homo sapiens
VNRPSWIMGNFRGHALPGTFFFIIGLWWCTKSILKYICKKQKRTCYLGSKTLFYRLEILEGITIVGMALTGMAGEQFIPGGPHLMLYDYKQGHWNQLLGWHHFTMYFFFGLLGVADILCFTISSLPVSLTKLMLSNALFVEAFIFYNHTHGREMLDIFVHQLLVLVVFLTGLVAFLEFLVRNNVLLELLRSSLILLQGSWFFQIGFVLYPPSGGPAWDLMDHENILFLTICFCWHYAVTIVIVGMNYAFITWLVKSRLKRLCSSEVGLLKNAEREQESEEEM

SEQ ID NO: 459 - protein, 19 aa, Homo sapiens
MVSILYLGLFFLNSSVLYA

SEQ ID NO: 460 - protein, 47 aa, Homo sapiens [sequence omitted]

SEQ ID NO: 461 - protein, 136 aa, Homo sapiens
SAQALHHPPHQGPPLFPSSAHPTVPPYPSQATHHTTLGPGPQHQPSGTGPHCPLPVTGPHLQPQGPNSIPTPTASGFCPHPGSVALPWGFKDLSRHLQCLDRFQFTEHRCHQHFKTITMGQGGIKMDSKNIFLNVL

SEQ ID NO: 462 - protein, 58 aa, Homo sapiens
  SITE (52): Xaa equals any of the naturally occurring L-amino acids
MAVFLISSSYFLLCVFTIRSLRAWVLPFTSVPRAQGGSCCRSQWLYKTLPPXLVCKPV

SEQ ID NO: 463 - protein, 58 aa, Homo sapiens
MAVFLISSSYFLLCVFTIRSLRAWVLPFTSVPRAQGGSCCRSQWLYKTLPPCLVCKPV

SEQ ID NO: 464 - protein, 58 aa, Homo sapiens; identical to SEQ ID NO: 462
  SITE (52): Xaa equals any of the naturally occurring L-amino acids

SEQ ID NO: 465 - protein, 58 aa, Homo sapiens
  SITE (19): Xaa equals any of the naturally occurring L-amino acids
  SITE (25): Xaa equals any of the naturally occurring L-amino acids
  SITE (28): Xaa equals any of the naturally occurring L-amino acids
  SITE (46): Xaa equals any of the naturally occurring L-amino acids
SRCAGAPLQNNGPVREATXLTLQNXGPXREATHLTLQNNGPMREAXHLVLHKWSICLR

SEQ ID NO: 466 - protein, 27 aa, Homo sapiens
MPYGPDPILSNVLLAGYIVLQTLSCPR

SEQ ID NO: 467 - protein, 139 aa, Homo sapiens
MVTVGLVICFSEWCCAGGLSAEQTVSDKHIDALMKEKEAGKSSGHYDPRHQGQALEEPSVHSCIYYLLTEQTQKVSTRTSLLRYRWPCEEVGWCWGLDLTGCPVVIQHEGVAGSEIIISDYPLTNENIKGIPEICLFHI

SEQ ID NO: 468 - protein, 43 aa, Homo sapiens [sequence omitted]

SEQ ID NO: 469 - protein, 38 aa, Homo sapiens
CFLLADVGNSIIFITNFMEQHQFRVKLENQCILIFVDY

SEQ ID NO: 470 - protein, 4 aa, Homo sapiens
VGFL

SEQ ID NO: 471 - protein, 77 aa, Homo sapiens
APRRQAQEWLGRTGNTFAPRLAVTSVKADRREMGPSSSVVAASPSLQDRVIITINNPSRVKKKKKKKKKKKKKKKKK

SEQ ID NO: 472 - protein, 245 aa, Homo sapiens
AWRRRRSGTSGKATWWCSGLRRASPTPSRRVQSWATAVMWKPSPSSSPASWSCTALRAPQSCLRAATVRPVTLQARADSPTVPEPVHRPQDPWHIPGVPEPVHRPQDPWHIPGVPEPVHRPQDPWHIPGVPEPVHRPQDPWPWLQLVPPAELAYCLLMLLLAHCMKQQARPGHPDFLHREAWACLSAAGGLASPGLLLWATARPRASGEAGPGRALVGADAACCPRHSVLSLVDIPSGQVLPQGQ

SEQ ID NO: 473 - protein, 43 aa, Homo sapiens
MAARGRSGVGPPGFLRALALLQLSCGFYWACSRGWMVRGTPHP

SEQ ID NO: 474 - protein, 43 aa, Homo sapiens; identical to SEQ ID NO: 473

SEQ ID NO: 475 - protein, 43 aa, Homo sapiens
MFNLSFFTLYGLCMLKLHSASSWFTLLLLISLFLSVVYCQSTN

SEQ ID NO: 476 - protein, 2 aa, Homo sapiens
LH

SEQ ID NO: 477 - protein, 43 aa, Homo sapiens; identical to SEQ ID NO: 475

SEQ ID NO: 478 - protein, 47 aa, Homo sapiens
MSLLLPPLALLLLLAALVAPATAATAYRPDWNRLSGLTRARVETCGG

SEQ ID NO: 479 - protein, 47 aa, Homo sapiens; identical to SEQ ID NO: 478

SEQ ID NO: 480 - protein, 365 aa, Homo sapiens
  SITE (313): Xaa equals any of the naturally occurring L-amino acids
  SITE (316): Xaa equals any of the naturally occurring L-amino acids
  SITE (333): Xaa equals any of the naturally occurring L-amino acids
  SITE (335): Xaa equals any of the naturally occurring L-amino acids
  SITE (338): Xaa equals any of the naturally occurring L-amino acids
  SITE (339): Xaa equals any of the naturally occurring L-amino acids
  SITE (352): Xaa equals any of the naturally occurring L-amino acids
  SITE (355): Xaa equals any of the naturally occurring L-amino acids
MLSGVWFLSVLTVAGILQTESRKTAKDICKIRCLCEEKENVLNINCENKGFTTVSLLQPPQYRIYQLFLNGNLLTRLYPNEFVNYSNAVTLHLGNNGLQEIRTGAFSGLKTLKRLHLNNNKLEILREDTFLGLESLEYLQADYNYISAIEAGAFSKLNKLKVLILNDNLLLSLPSNVFRFVLLTHLDLRGNRLKVMPFAGVLEHIGGIMEIQLEENPWNCTCDLLPLKAWLDTITVFVGEIVCETPFRLHGKDVTQLTRQDLCPRKSASDSSQRGSHADTHVQRLSPTMNPALNPTRAPKASRPPKMRNRPTXRVXVSKDRQSFGPIMVYQTXVXCAXXLSQQLCLHLSELXQWXECKLPRKEVH

SEQ ID NO: 481 - protein, 23 aa, Homo sapiens
GYWVSFLLHVDGVLAHLTTGGGI

SEQ ID NO: 482 - protein, 191 aa, Homo sapiens
MLSGVWFLSVLTVAGILQTESRKTAKDICKIRCLCEEKENVLNINCENKGFTTVSLLQPPQYRIYQLFLNGNLLTRLYPNEFVNYSNAVTLHLGNNGLQEIRTGAFSGLKTLKRLHLNNNKLEILREDTFLGLESLEYLQADYNYISAIEAGAFSKLNKLKVLILNDNLLLSLPSNVFRFVLLTHLDLRGN

SEQ ID NO: 483 - protein, 845 aa, Homo sapiens
  SITE (477): Xaa equals any of the naturally occurring L-amino acids
MLSGVWFLSVLTVAGILQTESRKTAKDICKIRCLCEEKENVLNINCENKGFTTVSLLQPPQYRIYQLFLNGNLLTRLYPNEFVNYSNAVTLHLGNNGLQEIRTGAFSGLKTLKRLHLNNNKLEILREDTFLGLESLEYLQADYNYISAIEAGAFSKLNKLKVLILNDNLLLSLPSNVFRFVLLTHLDLRGNRLKVMPFAGVLEHIGGIMEIQLEENPWNCTCDLLPLKAWLDTITVFVGEIVCETPFRLHGKDVTQLTRQDLCPRKSASDSSQRGSHADTHVQRLSPTMNPALNPTRAPKASRPPKMRNRPTPRVTVSKDRQSFGPIMVYQTKSPVPLTCPSSCVCTSQSSDNGLNVNCQERKFTNISDLQPKPTSPKKLYLTGNYLQTVYKNDLLEYSSLDLLHLGNNRIAVIQEGAFTNLTSLRRLYLNGNYLEVLYPSMFDGLQSLQYLYLEYNVIKEIKPLTFDALINLQLLXLNNNLLRSLPDNIFGGTALTRLNLRNNHFSHLPVKGVLDQLPAFIQIDLQENPWDCTCDIMGLKDWTEHANSPVIINEVTCESPAKHAGEILKFLGREAICPDSPNLSDGTVLSMNHNTDTPRSLSVSPSSYPELHTEVPLSVLILGLLVVFILSVCFGAGLFVFVLKRRKGVPSVPRNTNNLDVSSFQLQYGSYNTETHDKTDGHVYNYIPPPVGQMCQNPIYMQKEGDPVAYYRNLQEFSYSNLEEKKEEPATPAYTISATELLEKQATPREPELLYQNIAERVKELPSAGLVHYNFCTLPKRQFAPSYESRRQNQDRINKTVLYGTPRKCFVGQSKPNHPLLQAKPQSEPDYLEVLEKQTAISQL

SEQ ID NO: 484 - protein, 141 aa, Homo sapiens
  SITE (125): Xaa equals any of the naturally occurring L-amino acids
  SITE (131): Xaa equals any of the naturally occurring L-amino acids
FCLLHVPASCYCSFSNGITSPCHALGSPSLSISVLLSWLNPSTILNTGSSCPIPRLTLSDLPISLAFHAPLPPPPGFNWVRAVFLPLCSASALRTPRGLGGKVLTIFTLCLPLHHLFITSQPLLXQVFTHXLFLQVFDWRE

SEQ ID NO: 485 - protein, 8 aa, Homo sapiens
SHIVTCLG

SEQ ID NO: 486 - protein, 42 aa, Homo sapiens
MGLKNSSLITCFLLAFVVFVLFCLFCFVFLCYFIGKVSGMCS

SEQ ID NO: 487 - protein, 42 aa, Homo sapiens; identical to SEQ ID NO: 486

SEQ ID NO: 488 - protein, 27 aa, Homo sapiens
MRRMASALLLDQLTKALLSGHQNWKAF

SEQ ID NO: 489 - protein, 137 aa, Homo sapiens
  SITE (1): Xaa equals any of the naturally occurring L-amino acids
  SITE (7): Xaa equals any of the naturally occurring L-amino acids
  SITE (33): Xaa equals any of the naturally occurring L-amino acids
XRCFTFXFTDIVIMPKRKFPENTEGKDGSKVTXQEPTRRSARLSAKPAPPKPEPKPRKTSAKKEPGAKISRGAKGKKEEKQEAGKEGTAPSENGETKAEEIHISRSTVNVSTSRGTPPSTLSVKGQIETVRVKGTEN

SEQ ID NO: 490 - protein, 46 aa, Homo sapiens
  SITE (38): Xaa equals any of the naturally occurring L-amino acids
NKPDTGRKILHDLICGILKKKKKKSQIYRVNKRVGYQXQVGGEWEM

SEQ ID NO: 491 - protein, 50 aa, Homo sapiens
MQPPFVLTTTTMISLFLALISTKKVHLTIPQPFTSHSRLSFDVFKRKARA

SEQ ID NO: 492 - protein, 228 aa, Homo sapiens
TQDHQKLCYSALILAMVFSMGEAVPYAHYEHLGTPFAQFLLNIVEDGLPLDTTEQLPDLCVNLLLALNLHLPAADQNVIMAALSKHANVKIFSEKLLLLLNRGDDPVRIFKHEPQPPHSVLKFLQDVFGSPATAAIFYHTDMMALIDITVRHIADLSPGDKLRMEYLSLMHAIVRTTPYLQHRHRLPDLQAILRRILNEEETSPQCQMDRMIVREMCKEFLVLGEAPS

SEQ ID NO: 493 - protein, 13 aa, Homo sapiens
PFHFSTPSITGLF

SEQ ID NO: 494 - protein, 2 aa, Homo sapiens
FL

SEQ ID NO: 495 - protein, 50 aa, Homo sapiens; identical to SEQ ID NO: 491

SEQ ID NO: 496 - protein, 71 aa, Homo sapiens [sequence omitted]

SEQ ID NO: 497 - protein, 14 aa, Homo sapiens
LFILVLHNEDNLYG

SEQ ID NO: 498 - protein, 71 aa, Homo sapiens [sequence omitted]

SEQ ID NO: 499 - protein, 167 aa, Homo sapiens
  SITE (82): Xaa equals any of the naturally occurring L-amino acids
  SITE (88): Xaa equals any of the naturally occurring L-amino acids
  SITE (96): Xaa equals any of the naturally occurring L-amino acids
  SITE (106): Xaa equals any of the naturally occurring L-amino acids
  SITE (111): Xaa equals any of the naturally occurring L-amino acids
GRCLDCFNPFLLSCPRIGLVEQGGVKIEPLPKEVKVYLLTTSSAPYCMHHSLVEFHLKELRNKDTNIEVTFLSSNITSSSKXTIPKQXRYGERNHXPMPTPQCQIXQVKFXFQSSNRVWKKDRTTIIGKFCTALLPVNDREKMVCLPEPVNLQASVTVSCDLKIACV

SEQ ID NO: 500 - protein, 1 aa, Homo sapiens
M

SEQ ID NO: 501 - protein, 14 aa, Homo sapiens
TTEICGTLILREMI

SEQ ID NO: 502 - protein, 67 aa, Homo sapiens
MSLFLTLALCSVLLVHLNVLARNCFYDSGFVVHPWIWLGHSLPYFYFSPLSQRLFSYLWTFIFPCRL

SEQ ID NO: 503 - protein, 67 aa, Homo sapiens; identical to SEQ ID NO: 502

SEQ ID NO: 504 - protein, 5 aa, Homo sapiens
LYLFM

SEQ ID NO: 505 - protein, 65 aa, Homo sapiens
IIYLLFVTKWEIRKKVRKYLRGKSFLLSHVFSTCLPWYIINTDILHTPCKILLKLSSTWHVEYVP

SEQ ID NO: 506 - protein, 151 aa, Homo sapiens [sequence omitted]

SEQ ID NO: 507 - protein, 31 aa, Homo sapiens
LFLPFSMVLFCDPLNSKGSLICGCFRAVLPR

SEQ ID NO: 508 - protein, 151 aa, Homo sapiens
  SITE (130): Xaa equals any of the naturally occurring L-amino acids
MVVAAVYILYLLFLIVRACSELRHMPYVDLRLKFLTALTFVVLVISIAILYLRFGAQVLQDNFVAELSTHYQNSAEFLSFYGLLNFYLYTLAFVYSPSKNALYESQLKDNPAFSMLNDSDDDVIYGSDYXEMPLQNGQAIRAKYKEESDSD

SEQ ID NO: 509 - protein, 51 aa, Homo sapiens [sequence omitted]

SEQ ID NO: 510 - protein, 51 aa, Homo sapiens [sequence omitted]

SEQ ID NO: 511 - protein, 101 aa, Homo sapiens
LRDPENCVECGDGECACGCTHIGYLCVCTVYMQGCVYVCMCIRVWVWVWGVFRECAYTHGCLGMCTCLCVRGVCVCVCMVCVHMYALVCVHTWGVCAYVEV

SEQ ID NO: 512 - protein, 90 aa, Homo sapiens
  SITE (5): Xaa equals any of the naturally occurring L-amino acids
MYRGXRVKHPFVFRKLQVTQDDWIVRYRGLKGNAEVVHREQVNLPRTMGLRHALLTRRATRSMGAICVAGCGIPAQVSLSKRGILLVPKT

SEQ ID NO: 513 - protein, 45 aa, Homo sapiens
  SITE (39): Xaa equals any of the naturally occurring L-amino acids
LGSARHRPHALVLGMSSPFLKKTCSAVTTTKKHGEDWAXDMMFSS

SEQ ID NO: 514 - protein, 35 aa, Homo sapiens
  SITE (15): Xaa equals any of the naturally occurring L-amino acids
  SITE (20): Xaa equals any of the naturally occurring L-amino acids
LTSFGLRAILIFQMXSDVNXIGKHQRNGCKVSGTE

SEQ ID NO: 515 - protein, 50 aa, Homo sapiens [sequence omitted]

SEQ ID NO: 516 - protein, 75 aa, Homo sapiens
SPIIFPLNHYTRISHLCPPDILGWIILGLGGCPVRCRTFSSILGLFLLDASSTPFLSYDRLKCPPGKRWWQNYPW

SEQ ID NO: 517 - protein, 60 aa, Homo sapiens
MNESFYCSAFLPAFIVCWILAILIVLTCGFRMTDYIEHLHEILCHLYIFFGKASISGLST

SEQ ID NO: 518 - protein, 60 aa, Homo sapiens; identical to SEQ ID NO: 517

SEQ ID NO: 519 - protein, 33 aa, Homo sapiens
MAAAWFILLFKHCVHSSSIVDLSFKESSPWDIK

SEQ ID NO: 520 - protein, 12 aa, Homo sapiens
AWYVIITLVFDG

SEQ ID NO: 521 - protein, 15 aa, Homo sapiens
  SITE (10): Xaa equals any of the naturally occurring L-amino acids
  SITE (12): Xaa equals any of the naturally occurring L-amino acids
AWYVVMALTXMXWDF

SEQ ID NO: 522 - protein, 17 aa, Homo sapiens [sequence omitted]

SEQ ID NO: 523 - protein, 33 aa, Homo sapiens; identical to SEQ ID NO: 519

SEQ ID NO: 524 - protein, 85 aa, Homo sapiens
  SITE (32): Xaa equals any of the naturally occurring L-amino acids
LWRYLGFCILCHIWQKTFYLCCHEKGCTMTQXPPQASGPAEAKSEHREKRRKREDRWGKQERRDRDVHILGCQVWHSCSARVALS

SEQ ID NO: 525 - protein, 91 aa, Homo sapiens
  SITE (69): Xaa equals any of the naturally occurring L-amino acids
MRACVCVYACAHMCVCLAFSYLIGCIKCRPKDEGEDYTQSLAVTASVQKSCVWAQNYSLHSCNTYASRXQRALSPGLHNRREKQLCGELVT

SEQ ID NO: 526 - protein, 96 aa, Homo sapiens
MRACVCVYACAHMCVCLAFSYLIGCIKCRPKDEGEDLHPKPGCDSFCPEKLCLGSELLTTFMQYICKQGAESFITGATQQKGKTVMWRAGDLTREA

SEQ ID NO: 527 - protein, 48 aa, Homo sapiens [sequence omitted]

SEQ ID NO: 528 - protein, 4 aa, Homo sapiens
MFKM

SEQ ID NO: 529 - protein, 10 aa, Homo sapiens
IYQHFSLWLG

SEQ ID NO: 530 - protein, 48 aa, Homo sapiens [sequence omitted]

SEQ ID NO: 531 - protein, 22 aa, Homo sapiens
HSDLGLSCPELLLPCIILITFS

SEQ ID NO: 532 - protein, 96 aa, Homo sapiens
MHHHAHLSCYDFLMLLFLLLHPLLPPPPTASLPPSPLICLFLHTVPWNLSLASSHSTHSLRALPFTSAIVYTFTLDHSSEISQLLHPDGCSAPPPG

SEQ ID NO: 533 - protein, 111 aa, Homo sapiens
MHHHAHLSCYDFLMLLFLLLHPLLPPPPTASLPPSPLICLFLHTVPWNLSLASSHSTHSLRALPFTSAIVYTFTLDHSSEISQLLHPDGCSAPPPGCPTGTLNPTSPKLNS

SEQ ID NO: 534 - protein, 70 aa, Homo sapiens
  SITE (20): Xaa equals any of the naturally occurring L-amino acids
  SITE (60): Xaa equals any of the naturally occurring L-amino acids
GRKRDGGWRKGQKAQVEVPXLLARRILWPLGGWSGCVNQSLSQWRAGLVVCVFITGPHPXHTHTRTHCGV

SEQ ID NO: 535 - protein, 70 aa, Homo sapiens [sequence omitted]

SEQ ID NO: 536 - protein, 55 aa, Homo sapiens
MVAVCWCLALTAKVSASCSYMKLRPWPADPWQCWAWTWLPQPCCPATTQTLAWCS

SEQ ID NO: 537 - protein, 40 aa, Homo sapiens
MKCSKVLTQLILFTPLGVCKMSLFYKHNHNSNKPQVVASV

SEQ ID NO: 538 - protein, 40 aa, Homo sapiens; identical to SEQ ID NO: 537

SEQ ID NO: 539 - protein, 195 aa, Homo sapiens [sequence omitted]

SEQ ID NO: 540 - protein, 68 aa, Homo sapiens
  SITE (14): Xaa equals any of the naturally occurring L-amino acids
WPTVASPRTASRPXGPCQNCACWTTSGAGCRPGQTSMPPWTTGPRCCTSQPPTGSARRLPCCWNTEPA

SEQ ID NO: 541 - protein, 201 aa, Homo sapiens
RQAVIVCRRRFVMGPVRLGILLFLFLAVHEAWAGMLKEEDDDTERLPSKCEVCKLLSTELQAELSRTGRSREVLELGQVLDTGKRKRHVPYSVSETRLEEALENLCERILDYSVHAERKGSLRYAKGQSQTMATLKGLVQKGVKVDLGIPLELWDEPSVEVTYLKKQCETMLEEEEEEEEEEGGDKMTKTGSHPKLDREDL

SEQ ID NO: 542 - protein, 15 aa, Homo sapiens
MPPRAAWAWLLCGAS

SEQ ID NO: 543 - protein, 15 aa, Homo sapiens
MPPRAAWAWLLCGAS

SEQ ID NO: 544 - protein, 116 aa, Homo sapiens
  SITE (7): Xaa equals any of the naturally occurring L-amino acids
  SITE (16): Xaa equals any of the naturally occurring L-amino acids
SQLLRRXRQEDCLSPXGGSCSEPRLRHCTPAWVTERDSVSKKKKKTSEVGAVPYFCPTPIKRIPKTTCGNLIILSNLLFGQDWHLPCFSLLLAVKHGFKEECFSEFTLYISDLEVI

SEQ ID NO: 545 - protein, 51 aa, Homo sapiens [sequence omitted]

SEQ ID NO: 546 - protein, 51 aa, Homo sapiens [sequence omitted]

SEQ ID NO: 547 - protein, 69 aa, Homo sapiens
MAAARNLRTALIFGGFISMVGAAFYPIYFRPLMRLEEYQKEQAVNRAGIVQEDVQPPGLKVWSDPFGRK

SEQ ID NO: 548 - protein, 69 aa, Homo sapiens; identical to SEQ ID NO: 547

SEQ ID NO: 549 - protein, 79 aa, Homo sapiens
SGWQVPSSVKHLPYDNLRSHCVADEGETEVEGTRATWVEHSGRPGVGSGRPPGTSLTTLPLLLTHLSLTCPLGGDFSKR

SEQ ID NO: 550 - protein, 89 aa, Homo sapiens
MPVPLLASAAWCHLCAGALPAWLWLPWRAAAAQWHVCASHCLPLHPAFSALGPHPDPGRAGPGAAPRDCAHPELHPLCLPRWSLQLLPR

SEQ ID NO: 551 - protein, 21 aa, Homo sapiens
PWASSHLGPRPYVHGLAPSGP

SEQ ID NO: 552 - protein, 6 aa, Homo sapiens
PWPPLV

SEQ ID NO: 553 - protein, 6 aa, Homo sapiens
PWPPLV

SEQ ID NO: 554 - protein, 52 aa, Homo sapiens
DILNLYCTFYLRGSSFTCVFICVYLSYSKRSRESPCPRSSILRSEDVQNSSR

SEQ ID NO: 555 - protein, 39 aa, Homo sapiens [sequence omitted]

SEQ ID NO: 556 - protein, 12 aa, Homo sapiens
GGNVLIFHFRCL

SEQ ID NO: 557 - protein, 70 aa, Homo sapiens
MSHCTWPLDYSFLFMSCASICGQHGASVGNTGRKQVQIWLGLLAWQLGKPPLLWLLPRLFMTVAAHQLQL

SEQ ID NO: 558 - protein, 70 aa, Homo sapiens; identical to SEQ ID NO: 557

SEQ ID NO: 559 - protein, 62 aa, Homo sapiens
VYQRKSTVVLGGFLLWDIDFLFFFRNIVCCNLNKNYDILRYFIDKPNKNICFYFKVNVFLFS

SEQ ID NO: 560 - protein, 47 aa, Homo sapiens
MLRFSSSLLECLLSPLCLTDATGHHLDHPILVPVQVQKRNNVLKFTS

SEQ ID NO: 561 - protein, 49 aa, Homo sapiens [sequence omitted]

SEQ ID NO: 562 - protein, 49 aa, Homo sapiens [sequence omitted]

SEQ ID NO: 563 - protein, 47 aa, Homo sapiens
  SITE (25): Xaa equals any of the naturally occurring L-amino acids
MLIFSFLSFWFFQSCQGFIYFMSIXEEPVADFVHLYCVFYFQGCSYL

SEQ ID NO: 564 - protein, 128 aa, Homo sapiens
FSNTWSFPKDAFYTDFYLKSIVVREYCVFCSNPLKYIETCLICKYRFSYFSICDWKNINLTIWGYSIHTIHTNIYVFSVLQNFYIFPGICLLASLITERCTILSCTFFCCSLIFLSYPYGNCIKCIPI

SEQ ID NO: 565 - protein, 47 aa, Homo sapiens
MLIFSFLSFWFFQSCQGFIYFMSIFEEPVADFVHLYCVFYFQGCSYL

SEQ ID NO: 566 - protein, 34 aa, Homo sapiens
PCSWLRAVTLCQNLHWACTSCHCNCPCQCPQLLF

SEQ ID NO: 567 - protein, 193 aa, Homo sapiens [sequence omitted]

SEQ ID NO: 568 - protein, 138 aa, Homo sapiens
MCLLFLLPRFPVSWRAGVDGAAPSSQDLWRIRSPCGDCEGFDVHIMDDMIKVGRATLCIVPPTCSCIAGLSQGPSLGSTGSSVGGSEVRCCHFVWFNMSIAWYQPCSWLRAVTLCQNLHWACTSCHCNCPCQCPQLLF

SEQ ID NO: 569 - protein, 48 aa, Homo sapiens [sequence omitted]

SEQ ID NO: 570 - protein, 17 aa, Homo sapiens
FLSLLFFFLAFSFFTEA

SEQ ID NO: 571 - protein, 48 aa, Homo sapiens [sequence omitted]

SEQ ID NO: 572 - protein, 184 aa, Homo sapiens
  SITE (153): Xaa equals any of the naturally occurring L-amino acids
  SITE (178): Xaa equals any of the naturally occurring L-amino acids
  SITE (181): Xaa equals any of the naturally occurring L-amino acids
  SITE (182): Xaa equals any of the naturally occurring L-amino acids
VRMKYLFFSWLVVFVGSWIIYVQYSTYTELCRGKDCKKIICDKYKTGVIDGPACNSLCVTETLYFGKCLSTKPNNQMYLGIWDNLPGVVKCQMEQALHLDFGTELEPRKEIVLFDKPTRGTTVQKFKEMVYSLFKAKLGDQGNLSELVNLILXVADGDKDGQVSLGEAKSAWALLQLXEFXXHG

SEQ ID NO: 573 - protein, 3 aa, Homo sapiens
YTV

SEQ ID NO: 574 - protein, 403 aa, Homo sapiens
MKYLFFSWLVVFVGSWIIYVQYSTYTELCRGKDCKKIICDKYKTGVIDGPACNSLCVTETLYFGKCLSTKPNNQMYLGIWDNLPGVVKCQMEQALHLDFGTELEPRKEIVLFDKPTRGTTVQKFKEMVYSLFKAKLGDQGNLSELVNLILTVADGDKDGQVSLGEAKSAWALLQLNEFLLMVILQDKEHTPKLMGFCGDLYVMESVEYTSLYGISLPWVIELFIPSGFRRSMDQLFTPSWPRKAKIAIGLLEFVEDVFHGPYGNFLMCDTSAKNLGYNDKYDLKMVDMRKIVPETNLKELIKDRHCESDLDCVYGTDCRTSCDQSTMKCTSEVIQPNLAKACQLLKDYLLRGAPSEIREELEKQLYSCIALKVTANQMEMEHSLILNNLKTLLWKKISYTNDS

SEQ ID NO: 575 - protein, 60 aa, Homo sapiens
MSRFSQNFRGKEDHIVFLFCFNEIFFLLLMLLVFPWLLSKAVSGFAERLEMTTIFRVSRS

SEQ ID NO: 576 - protein, 60 aa, Homo sapiens; identical to SEQ ID NO: 575

SEQ ID NO: 577 - protein, 127 aa, Homo sapiens [sequence omitted]

SEQ ID NO: 578 - protein, 9 aa, Homo sapiens
LGKPWRYPT

SEQ ID NO: 579 - protein, 127 aa, Homo sapiens [sequence omitted]

SEQ ID NO: 580 - protein, 61 aa, Homo sapiens
MKSALHRDICILMLTAALFTIAKTEKQHKCPSIDEQINNLQYICTMEYHSALQKEMLLYLQ

SEQ ID NO: 581 - protein, 61 aa, Homo sapiens; identical to SEQ ID NO: 580

SEQ ID NO: 582 - protein, 61 aa, Homo sapiens; identical to SEQ ID NO: 580

SEQ ID NO: 583 - protein, 41 aa, Homo sapiens
MLVSMCMGLLFLQVGKQCIAFFYTESTRRPKHLKTMGSGYA

SEQ ID NO: 584 - protein, 41 aa, Homo sapiens; identical to SEQ ID NO: 583

SEQ ID NO: 585 - protein, 241 aa, Homo sapiens
  SITE (58): Xaa equals any of the naturally occurring L-amino acids
MFKLRQMRVEKFIYENHPDVFSDSSMDHFQKFLPTVGGQLGTAGQGFSYSKSNGRGGXQAGGSGSAGQYGSDQQHHLGSGSGAGGTGGPAGQAGRGGAAGTAGVGETGSGDQAGGEGKHITVFKTYISPWERAMGVDPQQKMELGIDLLAYGAKAELPKYKSFNRTAMPYGGYEKASKRMTFQMPKFDLGPLLSEPLVLYNQNLSNRPSFNRTPIPWLSSGEPVDYNVDIGIPLDGETEEL

SEQ ID NO: 586 - protein, 241 aa, Homo sapiens [sequence omitted]

SEQ ID NO: 587 - protein, 17 aa, Homo sapiens
RFPISPHPYQHAFLFFF

SEQ ID NO: 588 - protein, 39 aa, Homo sapiens
LRVAVGLCPRDALLLSPPRVVVCGVTDVVVDKGVGLLVV

SEQ ID NO: 589 - protein, 23 aa, Homo sapiens
  SITE (5): Xaa equals any of the naturally occurring L-amino acids
MRVTXSSHPCQRLVLQCSGFWLF

SEQ ID NO: 590 - protein, 27 aa, Homo sapiens
MRVTVSSHPCQRLVLSVFWLLAILIGV

SEQ ID NO: 591 - protein, 55 aa, Homo sapiens
MESSTGKASPRCHIHCVPPFPPPCPVKRVGRLFLFFQHFPQGTVIIPLMPSPPLD

SEQ ID NO: 592 - protein, 314 aa, Homo sapiens
  SITE (129): Xaa equals any of the naturally occurring L-amino acids
YSKTHSIKSAQPGVPTSARSPRQPSPGPTPPPFPGNRGTALGGGSIRQSPLSSSSPFSNRPPLPPTPSRALDDKPPPPPPPVGNRPSIHREAVPPPPPQNNKPPVPSTPRPSAASQAPPPPPPPSRPGXPPLPPSSSGNDETPRLPQRNLSLSSSTPPLPSPGRSGPLPPPPSERPPPPVRDPPGRSGPLPPPPPVSRNGSTSRALPATPQLPSRSGVDSPRSGPRPPLPPDRPSAGAPPPPPPSTSIRNGFQDSPCEDEWESRFYFHPISDLPPPEPYVQTTKSYPSKLARNESRSGSNRRERGAPPLPPIPR

SEQ ID NO: 593 - protein, 55 aa, Homo sapiens; identical to SEQ ID NO: 591

SEQ ID NO: 594 - protein, 53 aa, Homo sapiens
  SITE (23): Xaa equals any of the naturally occurring L-amino acids
FIIHSISPVALNPQAHDLPFSLXSCVSVFNLRSFPTMDSCTTLNETSIFQRRV

SEQ ID NO: 595 - protein, 261 aa, Homo sapiens
GIFRSLRVLFPLFSVGRPQFARSLSAAPQLSDTADTMGFGDLKSPAGLQVLNDYLADKSYIEGYVPSQADVAVFEAVSSPPPADLCHALRWYNHIKSYEKEKASLPGVKKALGKYGPADVEDTTGSGATDSKDDDDIDLFGSDDEEESEEAKRLREERLAQYESKKAKKPALVAKSSILLDVKPWDDETDMAKLEECVRSIQADGLVWGSSKLVPVGYGIKKLQIQCVVEDDKVGTDMLEEQITAFEDYVQSMDVAAFNKI

SEQ ID NO: 596 - protein, 44 aa, Homo sapiens
MKKEMVLLTTTYFSLHVKVFFCLFVCFSILSSSRRGSLANNSSW

SEQ ID NO: 597 - protein, 44 aa, Homo sapiens; identical to SEQ ID NO: 596

SEQ ID NO: 598 - protein, 42 aa, Homo sapiens
MFTLLLSSFFLQHCLQNNLYASEREQIFSNFLQLSSLKRRIC

SEQ ID NO: 599 - protein, 6 aa, Homo sapiens
LLLSSF

SEQ ID NO: 600 - protein, 42 aa, Homo sapiens; identical to SEQ ID NO: 598

SEQ ID NO: 601 - protein, 86 aa, Homo sapiens
  SITE (6): Xaa equals any of the naturally occurring L-amino acids
  SITE (21): Xaa equals any of the naturally occurring L-amino acids
  SITE (31): Xaa equals any of the naturally occurring L-amino acids
  SITE (76): Xaa equals any of the naturally occurring L-amino acids
LGSPEXAQKVDITSAHFIGQXSRPSDFAQVXSLEGSRPVIWSLNGWTLKETPRADGVFTETAGQGLGTAQGHLLWXAAATGSPDCS

SEQ ID NO: 602 - protein, 44 aa, Homo sapiens
MGVALPSPLLCSLPLFLLFGDVSGSSSLLALLPFLHPWHHPSLS

SEQ ID NO: 603 - protein, 44 aa, Homo sapiens; identical to SEQ ID NO: 602

SEQ ID NO: 604 - protein, 60 aa, Homo sapiens [sequence omitted]

SEQ ID NO: 605 - protein, 17 aa, Homo sapiens
ITFSCFFCNNCSQVNLQ

SEQ ID NO: 606 - protein, 60 aa, Homo sapiens [sequence omitted]

SEQ ID NO: 607 - protein, 97 aa, Homo sapiens
  SITE (87): Xaa equals any of the naturally occurring L-amino acids
  SITE (92): Xaa equals any of the naturally occurring L-amino acids
LGAEHFKCITWVAGWAVPGLKGVGSFFQGAPSASWHRTLAPAHPKLTLVGVGPLTQTWPLPSLVLLPQLSPVCGRVCLDRLWAGQGXGQAEXEFVLG

SEQ ID NO: 608 - protein, 318 aa, Homo sapiens
MRLLAGWLCLSLASVWLARRMWTLRSPLTRSLYVNMTSGPGGPAAAAGGRKENHQWYVCNREKLCESLQAVFVQSYLDQGTQIFLNNSIEKSGWLFIQLYHSFVSSVFSLFMSRTSINGLLGRGSMFVFSPDQFQRLLKINPDWKTHRLLDLGAGDGEVTKIMSPHFEEIYATELSETMIWQLQKKKYRVLGINEWQNTGFQYDVISCLNLLDRCDQPLTLLKDIRSVLEPTRGRVILALVLPFHPYVENVGGKWEKPSEILEIKGQNWEEQVNSLPEVFRKAGFVIEAFTRLPYLCEGDMYNDYYVLDDAVFVLKPV

SEQ ID NO: 609 - protein, 318 aa, Homo sapiens
MRLLAGWLCLSLASVWLARRMWTLRSPLTRSLYVNMTSGPGGPAAAAGGRKENHQWYVCNREKLCESLQAVFVQSYLDQGTQIFLNNSIEKSGWLFIQLYHSFVSSVFSLFMSRTSINGLLGRGSMFVFSPDQFQRLLKINPDWKTHRLLDLGAGDGEVTKIMSPHFEEIYATELSETMIWQLQKKKYRVLGINEWQNTGFQYDVISCLNLLDRCDQPLTLLKDIRSVLEPTRGRVILALVLPFHPYVENVGGKWEKPSEILEIKGQNWEEQVNSLPEVFRKAGFVIEAFTRLPYLCEGDMYNAYYVLDDAVFVLKPV

SEQ ID NO: 610 - protein, 195 aa, Homo sapiens
  SITE (159): Xaa equals any of the naturally occurring L-amino acids
  SITE (175): Xaa equals any of the naturally occurring L-amino acids
MWTLFALSGPLFLFQVLTFMIYIVSTVFCGHLGKVELASVTLAVAFVNVCGVSVGVGLSSACDTLMSQSFGSPNKKHVGVILQRGALVLLLCCLPCWALFLNTQHILLLFRQDPDVSRLTQDYVMIFIPGLPVIFLYNLLAKYLQNQVQVFSVWGGPSXSTLPYSSGRGAWGFPXLSTICEPALERGSLPTHLPY

SEQ ID NO: 611 - protein, 37 aa, Homo sapiens
LAGPVFIYFRRSPGPKSSVVWWATVSTVWPTMPWFLC

SEQ ID NO: 612 - protein, 3 aa, Homo sapiens
IPG

SEQ ID NO: 613 - protein, 180 aa, Homo sapiens
MWTLFALSGPLFLFQVLTFMIYIVSTVFCGHLGKVELASVTLAVAFVNVCGVSVGVGLSSACDTLMSQSFGSPNKKHVGVILQRGALVLLLCCLPCWALFLNTQHILLLFRQDPDVSRLTQDYVMIFIPGLPVIFLYNLLAKYLQNQVQVFECVGRPFSQHTALFQWEGGLGLSPSLHHL

SEQ ID NO: 614 - protein, 38 aa, Homo sapiens
EKKKKKKKRPGAVAHALIPALWETEAGGSPEVGSSRPA

SEQ ID NO: 615 - protein, 18 aa, Homo sapiens
MVRTLSLAVLSWLPAAVC

SEQ ID NO: 616 - protein, 18 aa, Homo sapiens
MVRTLSLAVLSWLPAAVC

SEQ ID NO: 617 - protein, 42 aa, Homo sapiens
MLLSWTVLIIILPFAGDVSSHLCILRPFAGSVSSCLSNFKRI

SEQ ID NO: 618 - protein, 42 aa, Homo sapiens; identical to SEQ ID NO: 617

SEQ ID NO: 619 - protein, 93 aa, Homo sapiens [sequence omitted]

SEQ ID NO: 620 - protein, 403 aa, Homo sapiens
  SITE (175): Xaa equals any of the naturally occurring L-amino acids
  SITE (320): Xaa equals any of the naturally occurring L-amino acids
  SITE (331): Xaa equals any of the naturally occurring L-amino acids
  SITE (368): Xaa equals any of the naturally occurring L-amino acids
MATAERRALGIGFQWLSLATLVLICAGQGGRREDGGPACYGGFDLYFILDKSGSVLHHWNEIYYFVEQLAHKFISPQLRMSFIVFSTRGTTLMKLTEDREQIRQGLEELQKVLPGGDTYMHEGFERASEQIYYENRQGYRTASVIIALTDGELHEDLFFYSEREANRSRDLGAIXYCVGVKDFNETQLARIADSKDHVFPVNDGFQALQGIIHSILKKSCIEILAAEPSTICAGESFQVVVRGNGFRHARNVDRVLCSFKINDSVTLNEKPFSVEDTYLLCPAPILKEVGMKAALQVSMNDGLSFISSSVIITTTHCSDXSILAIALLILXLLLALALLWWFWPLCCTVIIKEVPPPPAEESEVSDHXRMAVGGQGGRVGWRAGWAAGHLAPCRAELSQAQRI

SEQ ID NO: 621 - protein, 403 aa, Homo sapiens
MATAERRALGIGFQWLSLATLVLICAGQGGRREDGGPACYGGFDLYFILDKSGSVLHHWNEIYYFVEQLAHKFISPQLRMSFIVFSTRGTTLMKLTEDREQIRQGLEELQKVLPGGDTYMHEGFERASEQIYYENRQGYRTASVIIALTDGELHEDLFFYSEREANRSRDLGAIVYCVGVKDFNETQLARIADSKDHVFPVNDGFQALQGIIHSILKKSCIEILAAEPSTICAGESFQVVVRGNGFRHARNVDRVLCSFKINDSVTLNEKPFSVEDTYLLCPAPILKEVGMKAALQVSMNDGLSFISSSVIITTTHCSDGSILAIALLILFLLLALALLWWFWPLCCTVIIKEVPPPPAEESEVSDHSRMAVGGQGGRVGWRAGWAAGHLAPCRAELSQAQRI

SEQ ID NO: 622 - protein, 156 aa, Homo sapiens
  SITE (102): Xaa equals any of the naturally occurring L-amino acids
VVKITHCPTLLTRDGDRIRSNGKFGGLQNKAPPMDKLRGMVFGAPVPKQCLILGEQIDLLQQYRSAVCKLDSVNKDLNSQLEYLRTPDMRKKKQELDEHEKXLKLIEEKLGMTPIRKCNDSLRHSPKVETTDCPVPPKRMRREATRQNRIITKTDV

SEQ ID NO: 623 - protein, 175 aa, Homo sapiens
  SITE (91): Xaa equals any of the naturally occurring L-amino acids
  SITE (173): Xaa equals any of the naturally occurring L-amino acids
  SITE (174): Xaa equals any of the naturally occurring L-amino acids
  SITE (175): Xaa equals any of the naturally occurring L-amino acids
VFGMLLGDTIILDNLDAANHYRKEVVKITHCPTLLTRDGDRIRSNGKFGGLQNKAPPMDKLRGMVFGAPVPKQCLILGEQIDLLQQYRSAXCKLDSVNKDLNSQLEYLRTPDMRKKKQELDEHEKNLKLIEEKLGMTPIRKCNDSLRHSPKVETTDCPVPPKRMRREAGDKRXXX

SEQ ID NO: 624 - protein, 24 aa, Homo sapiens
MWHLWRRLLSCFPVAMLQDYKYSV

SEQ ID NO: 625 - protein, 20 aa, Homo sapiens
SCLPVGTDPQQMQKHLVVIK

SEQ ID NO: 626 - protein, 24 aa, Homo sapiens
MWHLWRRLLSCFPVAMLQDYKYSV

SEQ ID NO: 627 - protein, 439 aa, Homo sapiens
  SITE (358): Xaa equals any of the naturally occurring L-amino acids
MVPSSPRALFLLLLILACPEPRASQNCLSKQQLLSAIRQLQQLLKGQETRFAEGIRHMKSRLAALQNSVGRVGPDALPVSCPALNTPADGRKFGSKYLVDHEVHFTCNPGFRLVGPSSVVCLPNGTWTGEQPHCRGISECSSQPCQNGGTCVEGVNQYRCICPPGRTGNRCQHQAQTAAPEGSVAGDSAFSRAPRCAQVERAQHCSCEAGFHLSGAAGDSVCQDVNECELYGQEGRPRLCMHACVNTPGSYRCTCPGGYRTLADGKSCEDVDECVGLQPVCPQGTTCINTGGSFQCVSPECPEGSGNVSYVKTSPFQCERNPCPMDSRPCRHLPKTISFHYLSLPSNLKTPITLFRMXTASAPGRAGPNSLRFGIVGGNSRGHFVMQRSDRQTGDLILVQNLEGPQTLEVDVDMSEYLDRSFQANHVSKVTIFVSPYDF

SEQ ID NO: 628 - protein, 439 aa, Homo sapiens
MVPSSPRALFLLLLILACPEPRASQNCLSKQQLLSAIRQLQQLLKGQETRFAEGIRHMKSRLAALQNSVGRVGPDALPVSCPALNTPADGRKFGSKYLVDHEVHFTCNPGFRLVGPSSVVCLPNGTWTGEQPHCRGISECSSQPCQNGGTCVEGVNQYRCICPPGRTGNRCQHQAQTAAPEGSVAGDSAFSRAPRCAQVERAQHCSCEAGFHLSGAAGDSVCQDVNECELYGQEGRPRLCMHACVNTPGSYRCTCPGGYRTLADGKSCEDVDECVGLQPVCPQGTTCINTGGSFQCVSPECPEGSGNVSYVKTSPFQCERNPCPMDSRPCRHLPKTISFHYLSLPSNLKTPITLFRMATASAPGRAGPNSLRFGIVGGNSRGHFVMQRSDRQTGDLILVQNLEGPQTLEVDVDMSEYLDRSFQANHVSKVTIFVSPYDF

SEQ ID NO: 629 - protein, 32 aa, Homo sapiens
WNPISMKNKLKILKIKKKKKKKKKKKKKKGRP

SEQ ID NO: 630 - protein, 15 aa, Homo sapiens
PAPLPLRWSPAGPGQ

SEQ ID NO: 631 - protein, 44 aa, Homo sapiens
MAPACQILRWALALGLGLMFEVTHAFRSQGRGSLVVAVGRERKM

SEQ ID NO: 632 - protein, 44 aa, Homo sapiens; identical to SEQ ID NO: 631

SEQ ID NO: 633 - protein, 42 aa, Homo sapiens
MFKKDLICKRWSFFFWGLLISVVILTSFSNYSRRFYLDLYFS

SEQ ID NO: 634 - protein, 7 aa, Homo sapiens
FIGFILC

SEQ ID NO: 635 - protein, 42 aa, Homo sapiens; identical to SEQ ID NO: 633

SEQ ID NO: 636 - protein, 93 aa, Homo sapiens
  SITE (13): Xaa equals any of the naturally occurring L-amino acids
  SITE (39): Xaa equals any of the naturally occurring L-amino acids
WFQTVDRHCFVLXTDKVKLTWRDRFPAYLTNLVSIIFMXSSRRLRPDEVRGNRKEVIGFSRAWWFTTVIPALWEAEAGRSLEVRSSRPAWPIW

SEQ ID NO: 637 - protein, 35 aa, Homo sapiens [sequence omitted]

SEQ ID NO: 638 - protein, 35 aa, Homo sapiens [sequence omitted]

SEQ ID NO: 639 - protein, 394 aa, Homo sapiens [sequence omitted]

SEQ ID NO: 640 - protein, 49 aa, Homo sapiens
MSPRPLIARCEALGCGARRLPWWALAMALCACGRCVAANSIGETLPSEV

SEQ ID NO: 641 - protein, 49 aa, Homo sapiens; identical to SEQ ID NO: 640

SEQ ID NO: 642 - protein, 85 aa, Homo sapiens
PSVALCWIFFIPLGKWEFFYRPAILLLCQIALYYQDTPMAHFRLTELFLYECTVVIFWAVCEFLVTHPLTTKALSEQYKSIKAQI

SEQ ID NO: 643 - protein, 85 aa, Homo sapiens
  SITE (8): Xaa equals any of the naturally occurring L-amino acids
  SITE (33): Xaa equals any of the naturally occurring L-amino acids
MVGLPAVXQLFWGLCLCTCGLYPAPQSWLSSGXYKVTSGAPSERMWPQRHASGFRLSGRTCLRATAPSPSFPFFSAVINLSACSK

SEQ ID NO: 644 - protein, 54 aa, Homo sapiens
MVGLPAVVQLFWGLCLCTCGAVSCPTELAVQWRIQSDIWCSLRKNVAPEACQWL

SEQ ID NO: 645 - protein, 81 aa, Homo sapiens
  SITE (67): Xaa equals any of the naturally occurring L-amino acids
  SITE (76): Xaa equals any of the naturally occurring L-amino acids
  SITE (81): Xaa equals any of the naturally occurring L-amino acids
MILGIHWGIFLLLLLSWLELQRTVIFFFSPFPIQKHYTLGHFSFSQRRFMDSQTELCATGKVKREKXADEVTWLHXLHHAX

SEQ ID NO: 646 - protein, 73 aa, Homo sapiens
IFLLLLLSWLELQRTVIFFFSPFPIQKHYTLGHFSFSQRRFMDSQTELCATGKVKREKAADEVTWLHVLHHAE

SEQ ID NO: 647 - protein, 9 aa, Homo sapiens
WGLLYLELN

SEQ ID NO: 648 - protein, 81 aa, Homo sapiens
MILGIHWGIFLLLLLSWLELQRTVIFFFSPFPIQKHYTLGHFSFSQRRFMDSQTELCATGKVKREKAADEVTWLHVLHHAE

SEQ ID NO: 649 - protein, 870 aa, Homo sapiens
  SITE (534): Xaa equals any of the naturally occurring L-amino acids
MGPPSLVLCLLSATVFSLLGGSSAFLSHHRLKGRFQRDRRNIRPNIILVLTDDQDVELGSMQVMNKTRRIMEQGGAHFINAFVTTPMCCPSRSSILTGKYVHNHNTYTNNENCSSPSWQAQHESRTFAVYLNSTGYRTAFFGKYLNEYNGSYVPPGWKEWVGLLKNSRFYNYTLCRNGVKEKHGSDYSKDYLTDLITNDSVSFFRTSKKMYPHRPVLMVISHAAPHGPEDSAPQYSRLFPNASQHITPSYNYAPNPDKHWIMRYTGPMKPIHMEFTNMLQRKRLQTLMSVDDSMETIYNMLVETGELDNTYIVYTADHGYHIGQFGLVKGKSMPYEFDIRVPFYVRGPNVEAGCLNPHIVLNIDLAPTILDIAGLDIPADMDGKSILKLLDTERPVNRFHLKKKMRVWRDSFLVERGKLLHKRDNDKVDAQEENFLPKYQRVKDLCQRAEYQTACEQLGQKWQCVEDATGKLKLHKCKGPMRLGGSRALSNLVPKYYGQGSEACTCDSGDYKLSLAGRRKKLFKKKYKASYVRXRSIRSVAIEVDGRVYHVGLGDAAQPRNLTKRHWPGAPEDQDDKDGGDFSGTGGLPDYSAANPIKVTHRCYILENDTVQCDLDLYKSLQAWKDHKLHIDHEIETLQNKIKNLREVRGHLKKKRPEECDCHKISYHTQHKGRLKHRGSSLHPFRKGLQEKDKVWLLREQKRKKKLRKLLKRLQNNDTCSMPGLTCFTHDNQHWQTAPFWTLGPFCACTSANNNTYWCMRTINETHNFLFCEFATGFLEYFDLNTDPYQLMNAVNTLDRDVLNQLHVQLMELRSCKGYKQCNPRTRNMDLGLKDGGSYEQYRQFQRRKWPEMKRPSSKSLGQLWEGWEG

SEQ ID NO: 650 - protein, 870 aa, Homo sapiens
MGPPSLVLCLLSATVFSLLGGSSAFLSHHRLKGRFQRDRRNIRPNIILVLTDDQDVELGSMQVMNKTRRIMEQGGAHFINAFVTTPMCCPSRSSILTGKYVHNHNTYTNNENCSSPSWQAQHESRTFAVYLNSTGYRTAFFGKYLNEYNGSYVPPGWKEWVGLLKNSRFYNYTLCRNGVKEKHGSDYSKDYLTDLITNDSVSFFRTSKKMYPHRPVLMVISHAAPHGPEDSAPQYSRLFPNASQHITPSYNYAPNPDKHWIMRYTGPMKPIHMEFTNMLQRKRLQTLMSVDDSMETIYNMLVETGELDNTYIVYTADHGYHIGQFGLVKGKSMPYEFDIRVPFYVRGPNVEAGCLNPHIVLNIDLAPTILDIAGLDIPADMDGKSILKLLDTERPVNRFHLKKKMRVWRDSFLVERGKLLHKRDNDKVDAQEENFLPKYQRVKDLCQRAEYQTACEQLGQKWQCVEDATGKLKLHKCKGPMRLGGSRALSNLVPKYYGQGSEACTCDSGDYKLSLAGRRKKLFKKKYKASYVRSRSIRSVAIEVDGRVYHVGLGDAAQPRNLTKRHWPGAPEDQDDKDGGDFSGTGGLPDYSAANPIKVTHRCYILENDTVQCDLDLYKSLQAWKDHKLHIDHEIETLQNKIKNLREVRGHLKKKRPEECDCHKISYHTQHKGRLKHRGSSLHPFRKGLQEKDKVWLLREQKRKKKLRKLLKRLQNNDTCSMPGLTCFTHDNQHWQTAPFWTLGPFCACTSANNNTYWCMRTINETHNFLFCEFATGFLEYFDLNTDPYQLMNAVNTLDRDVLNQLHVQLMELRSCKGYKQCNPRTRNMDLGLKDGGSYEQYRQFQRRKWPEMKRPSSKSLGQLWEGWEG

SEQ ID NO: 651 - protein, 204 aa, Homo sapiens
MMPLLSLIFSALFILFGTVIVQAFSDSNDERESSPPEKEEAQEKTGKTEPSFTKENSSKIPKKGFVEVTELTDVTYTSNLVRLRPGHMNVVLILSNSTKTSLLQKFALEVYTFTGSSCLHFSFLSLDKHREWLEYLLEFAQDAAPIPNQYDKHFMERDYTGYVLALNGHKKYFCLFKPQKTVEEEEAIGSCSDVDSSLYLGESR

SEQ ID NO: 652 - protein, 332 aa, Homo sapiens
  SITE (204): Xaa equals any of the naturally occurring L-amino acids
  SITE (283): Xaa equals any of the naturally occurring L-amino acids
  SITE (305): Xaa equals any of the naturally occurring L-amino acids
MEVRKLSISWQFLIVLVLILQILSALDFDPYRVLGVSRTASQADIKKAYKKLAREWHPDKNKDPGAEDKFIQISKAYEILSNEEKRSNYDQYGDAGENQGYQKQQQQREYRFRHFHENFYFDESFFHFPFNSERRDSIDEKYLLHFSHYVNEVVPDSFKKPYLIKITSDWCFSCIHIEPVWKEVIQELEELGVGIGVVHAGYEXRLAHHLGAHSTPSILGIINGKISFFHNAVVRENLRQFVESLLPGNLVEKVTNKNYVRFLSGWQQENKPHVLLFDQTPIXPLLYKLTAFAYKDYLSFGYVYXGLRGTEEMTRRYNINIYAPTLLALKNI

SEQ ID NO: 653 - protein, 737 aa, Homo sapiens
MEVRKLSISWQFLIVLVLILQILSALDFDPYRVLGVSRTASQADIKKAYKKLAREWHPDKNKDPGAEDKFIQISKAYEILSNEEKRSNYDQYGDAGENQGYQKQQQQREYRFRHFHENFYFDESFFHFPFNSERRDSIDEKYLLHFSHYVNEVVPDSFKKPYLIKITSDWCFSCIHIEPVWKEVIQELEELGVGIGVVHAGYERRLAHHLGAHSTPSILGIINGKISFFHNAVVRENLRQFVESLLPGNLVEKVTNKNYVRFLSGWQQENKPHVLLFDQTPIVPLLYKLTAFAYKDYLSFGYVYVGLRGTEEMTRRYNINIYAPTLLVFKEHINRPADVIQARGMKKQIIDDFITRNKYLLAARLTSQKLFHELCPVKRSHRQRKYCVVLLTAETTKLSKPFEAFLSFALANTQDTVRFVHVYSNRQQEFADTLLPDSEAFQGKSAVSILERRNTAGRVVYKTLEDPWIGSESDKFILLGYLDQLRKDPALLSSEAVLPDLTDELAPVFLLRWFYSASDYISDCWDSIFHNNWREMMPLLSLIFSALFILFGTVIVQAFSDSNDERESSPPEKEEAQEKTGKTEPSFTKENSSKIPKKGFVEVTELTDVTYTSNLVRLRPGHMNVVLILSNSTKTSLLQKFALEVYTFTGSSCLHFSFLSLDKHREWLEYLLEFAQDAAPIPNQYDKHFMERDYTGYVLALNGHKKYFCLFKPQKTVEEEEAIGSCSDVDSSLYLGE

SEQ ID NO: 654 - protein, 42 aa, Homo sapiens
MNSSFFISLPALIWSVCLILGWWQVSSGKVAHCGFIFCFPNN

SEQ ID NO: 655 - protein, 111 aa, Homo sapiens
CGSHRMSWKMYCPLHFSGRVCEELKFFFSFFFFLRRSLTPAQATAGDSVSKKQREERKKEKKEGRRKEGRNEGTKEGRKRKEGRKKERERERKKERKKERKKEKKKKKTGT

SEQ ID NO: 656 - protein, 42 aa, Homo sapiens; identical to SEQ ID NO: 654

SEQ ID NO: 657 - protein, 128 aa, Homo sapiens
  SITE (67): Xaa equals any of the naturally occurring L-amino acids
  SITE (68): Xaa equals any of the naturally occurring L-amino acids
  SITE (70): Xaa equals any of the naturally occurring L-amino acids
  SITE (96): Xaa equals any of the naturally occurring L-amino acids
MPVFVCSIGLCFLFSILLLFPPFQFSYICWLSQASVYSPSPSLSNLEVLLCLSILLMIIFPFLISIXXIXSIGRLSTHMGAHTHTHTHTHTHTHTXVCYWPLLLISQENEPFRMFLPLHSALTQNFCS

SEQ ID NO: 658 - protein, 128 aa, Homo sapiens
MPVFVCSIGLCFLFSILLLFPPFQFSYICWLSQASVYSPSPSLSNLEVLLCLSILLMIIFPFLISIIHIFSIGRLSTHMGAHTHTHTHTHTHTHTQVCYWPLLLISQENEPFRMFLPLHSALTQNFCS

SEQ ID NO: 659 - protein, 24 aa, Homo sapiens
  SITE (9): Xaa equals any of the naturally occurring L-amino acids
  SITE (18): Xaa equals any of the naturally occurring L-amino acids
MSWRVWALXFFPAVCVCXCVCVYT

SEQ ID NO: 660 - protein, 65 aa, Homo sapiens
VLMRSDGFIRGFSPFCWALLLLPPREEGCVCFPFCHDCKFPVASPSLRNCESIKALFFIKKKKKN

SEQ ID NO: 661 - protein, 38 aa, Homo sapiens
MSWRVWALLFFPAVCVCVCVCVCACTRTRVCDETIKLV

SEQ ID NO: 662 - protein, 37 aa, Homo sapiens
MVESPVCGLLEGWFFLLFSLAFLSTHLFSEASPLSIL

SEQ ID NO: 663 - protein, 37 aa, Homo sapiens; identical to SEQ ID NO: 662

SEQ ID NO: 664 - protein, 58 aa, Homo sapiens
MTLSVLQHFFICVLLILLLDTNLCRQISSHSFEFSGNQPLVFCCISSISAKLVLDQAG

SEQ ID NO: 665 - protein, 2 aa, Homo sapiens
LE

SEQ ID NO: 666 - protein, 58 aa, Homo sapiens; identical to SEQ ID NO: 664

SEQ ID NO: 667 - protein, 124 aa, Homo sapiens
  SITE (89): Xaa equals any of the naturally occurring L-amino acids
  SITE (103): Xaa equals any of the naturally occurring L-amino acids
  SITE (104): Xaa equals any of the naturally occurring L-amino acids
  SITE (113): Xaa equals any of the naturally occurring L-amino acids
  SITE (121): Xaa equals any of the naturally occurring L-amino acids
VAQVQVPGGHIGLGYLARIDFHRRDGTGGIPARIDGGEIDVALLPGQAVDHIMARACGGEHLAEVGRGTVQGLLGRAVLAAQARRAPPXQPLPATMGFWGWKXXPNRGLWFKXWKPPFGAXGVP

SEQ ID NO: 668 - protein, 283 aa, Homo sapiens
  SITE (174): Xaa equals any of the naturally occurring L-amino acids
  SITE (189): Xaa equals any of the naturally occurring L-amino acids
  SITE (205): Xaa equals any of the naturally occurring L-amino acids
MKIVPLTAAVLALVLAPAAHAQPANKATTVSPTAAAFLAQFATEGNDSVSWAQFEAFRKQRYADTDRNQDGHVDEQEYVDEYLQRFDVRLADARAGHLRQTDTRFKALDRDGNGAISRAEYDAAGERTWAGYERSQNATQETAAASSRDPLKMPTSHTANGMLDLYDRNKDGAXDREEFDAVRAASFAXTDTDGNGTLSLAEYTXEFEGRLDQQRQRVRADAERQARVRFASLDKDTDGRMTFAEYQLSGKRMFDRADSNGDGVVDARDPEPVAGAHSANGNR

SEQ ID NO: 669 - protein, 283 aa, Homo sapiens
MKIVPLTAAVLALVLAPAAHAQPANKATTVSPTAAAFLAQFATEGNDSVSWAQFEAFRKQRYADTDRNQDGHVDEQEYVDEYLQRFDVRLADARAGHLRQTDTRFKALDRDGNGAISRAEYDAAGERTWAGYERSQNATQETAAASSRDPLKMPTSHTANGMLDLYDRNKDGAVDREEFDAVRAASFAATDTDGNGTLSLAEYTAEFEGRLDQQRQRVRADAERQARVRFASLDKDTDGRMTFAEYQLSGKRMFDRADSNGDGVVDARDPEPVAGAHSANGNR

SEQ ID NO: 670 - protein, 86 aa, Homo sapiens
  SITE (4): Xaa equals any of the naturally occurring L-amino acids
  SITE (11): Xaa equals any of the naturally occurring L-amino acids
NLWXAHFFLNXSSIQIEYPPLSKMLETPKGKGWFFGEFFFWVFLFFLGFAFGFWNSLFVLYLFVGHPKSEICSKIQNVKCSSEHFL

SEQ ID NO: 671 - protein, 57 aa, Homo sapiens
MGLLPGWLLLWARLKCFCAVGLGSLAAVYGRGPGLPQDQLDCVLWDCGTLGLYRGQF

SEQ ID NO: 672 - protein, 12 aa, Homo sapiens
  SITE (8): Xaa equals any of the naturally occurring L-amino acids
LFSGWLVXLCGV

SEQ ID NO: 673 - protein, 48 aa, Homo sapiens
  SITE (31): Xaa equals any of the naturally occurring L-amino acids
MGETLVSVFLKPPALTWLLRAICLMVQTWAXGQRSWPQSLALPCYLNR

SEQ ID NO: 674 - protein, 29 aa, Homo sapiens
  SITE (3): Xaa equals any of the naturally occurring L-amino acids
  SITE (13): Xaa equals any of the naturally occurring L-amino acids
  SITE (17): Xaa equals any of the naturally occurring L-amino acids
  SITE (19): Xaa equals any of the naturally occurring L-amino acids
  SITE (23): Xaa equals any of the naturally occurring L-amino acids
MLXSNSFSPSLSXYLCXLXFSLXSSKSSK

SEQ ID NO: 675 - protein, 29 aa, Homo sapiens [sequence omitted]

SEQ ID NO: 676 - protein, 57 aa, Homo sapiens
MPPHRQTDGQMGLPAPALWVWGLLLSSSFQTLLPAFPKPPALNLGCSTRPIPSFLKI

SEQ ID NO: 677 - protein, 93 aa, Homo sapiens
  SITE (24): Xaa equals any of the naturally occurring L-amino acids
  SITE (65): Xaa equals any of the naturally occurring L-amino acids
QVSLPTRLLQMPGMGLDSRFQAWXPSPYLGPQPRAPRPGLQPGPSLRGAEFRESCPRSQKRGREXGRPCPGCRPGGWGLPARLGQPQLQTGPG

SEQ ID NO: 678 - protein, 57 aa, Homo sapiens; identical to SEQ ID NO: 676

SEQ ID NO: 679 - protein, 25 aa, Homo sapiens
  SITE (13): Xaa equals any of the naturally occurring L-amino acids
MVGRCSILSSTPXRHPSLSWEGLGG

SEQ ID NO: 680 - protein, 25 aa, Homo sapiens
MVGRCSILSSTPQRHPSLSWEGLGG

SEQ ID NO: 681 - protein, 18 aa, Homo sapiens
  SITE (13): Xaa equals any of the naturally occurring L-amino acids
MGTQGCPHPSWLXLLGLS

SEQ ID NO: 682 - protein, 30 aa, Homo sapiens
MGTQGCPHPSWLLLLGLSWWGEGDGAVGPC

SEQ ID NO: 683 - protein, 10 aa, Homo sapiens
SLLELGLGPL

SEQ ID NO: 684 - protein, 206 aa, Homo sapiens
  SITE (2): Xaa equals any of the naturally occurring L-amino acids
  SITE (3): Xaa equals any of the naturally occurring L-amino acids
  SITE (41): Xaa equals any of the naturally occurring L-amino acids
DXXPGAYAGFRPNANRISFPVFRNNVCPWPEALRSAPKLLXLDEPMGALDKKLRDRMQLEVVDILERVGVTCVMVTHDQEEAMTMAGRIAIMNRGKFVQIGEPEEIYEHPTTRYSAEFIGSVNVFEGVLKERQEDGLVLDSPGLVHPLKVDADASVVDNVPVHVALRPEKIMLCEEPPANGCNFAVGEVIHIAYLGDLSVYHVRLK

SEQ ID NO: 685 - protein, 440 aa, Homo sapiens
  SITE (168): Xaa equals any of the naturally occurring L-amino acids
  SITE (169): Xaa equals any of the naturally occurring L-amino acids
  SITE (173): Xaa equals any of the naturally occurring L-amino acids
  SITE (180): Xaa equals any of the naturally occurring L-amino acids
  SITE (191): Xaa equals any of the naturally occurring L-amino acids
MASLVSLELGLLLAVLVVTATASPPAGLLSLLTSGQGALDQEALGGLLNTLADRVHCANGPCGKCLSVEDALGLGEPEGSGLPPGPVLEARYVARLSAAAVLYLSNPEGTCEDARAGLWASHADHLLALLESPKALTPGLSWLLQRMQARAAGQTPKTACVDIPQLLXXAVGXGAPGSAXGVLAALLDHVXSGSCFHALPSPQYFVDFVFQQHSSEVPMTLAELSALMQRLGVGREAHSDHSHRHRGASSRDPVPLISSSNSSSVWDTVCLSARDVMAAYGLSEQAGVTPEAWAQLSPALLQQQLSGACTSQSRPPVQDQLSQSERYLYGSLATLLICLCAVFGLLLLTCTGCRGVTHYILQTFLSLAVGALTGDAVLHLTPKVLGLHTHSEEGLSPQPTWRLLAMLAGLYAFFLFENLFNLLLPRDPEDLEDGPAATAA

SEQ ID NO: 686 - protein, 647 aa, Homo sapiens
MASLVSLELGLLLAVLVVTATASPPAGLLSLLTSGQGALDQEALGGLLNTLADRVHCANGPCGKCLSVEDALGLGEPEGSGLPPGPVLEARYVARLSAAAVLYLSNPEGTCEDARAGLWASHADHLLALLESPKALTPGLSWLLQRMQARAAGQTPKTACVDIPQLLEEAVGAGAPGSAGGVLAALLDHVRSGSCFHALPSPQYFVDFVFQQHSSEVPMTLAELSALMQRLGVGREAHSDHSHRHRGASSRDPVPLISSSNSSSVWDTVCLSARDVMAAYGLSEQAGVTPEAWAQLSPALLQQQLSGACTSQSRPPVQDQLSQSERYLYGSLATLLICLCAVFGLLLLTCTGCRGVTHYILQTFLSLAVGALTGDAVLHLTPKVLGLHTHSEEGLSPQPTWRLLAMLAGLYAFFLFENLFNLLLPRDPEDLEDGPCGHSSHSHGGHSHGVSLQLAPSELRQPKPPHEGSRADLVAEESPELLNPEPRRLSPELRLLPYMITLGDAVHNFADGLAVGAAFASSWKTGLATSLAVFCHELPHELGDFAALLHAGLSVRQALLLNLASALTAFAGLYVALAVGVSEESEAWILAVATGLFLYVALCDMLPAMLKVRDPRPWLLFLLHNVGLLGGWTVLLLLSLYEDDITF

SEQ ID NO: 687 - protein, 49 aa, Homo sapiens
  SITE (48): Xaa equals any of the naturally occurring L-amino acids
ISVIFNDTVKKTMQECSAMKQIFKDLFTGFLSWNIHLFPRCLCDSEIXP

SEQ ID NO: 688 - protein, 307 aa, Homo sapiens
  SITE (249): Xaa equals any of the naturally occurring L-amino acids
  SITE (261): Xaa equals any of the naturally occurring L-amino acids
MLRVVEGIFIFVVVSESVFGVLGNGFIGLVNCIDCAKNKLSTIGFILTGLAISRIFLIWIIITDGFIQIFSPNIYASGNLIEYISYFWVIGNQSSMWFATSLSIFYFLKIANFSNYIFLWLKSRTNMVLPFMIVFLLISSLLNFAYIAKILNDYKMKNDTVWDLNMYKSEYFIKQILLNLGVIFFFTLSLITCIFLIISLWRHNRQMQSNVTGLRDSNTEAHVKAMKVLISFIILFILYFIGMAIEISXFTVRENKLLLMXGMTTTAIYPWGHSFILILGNSKLKQASLRVLQQLKCCEKRKNLRVT

SEQ ID NO: 689 - protein, 181 aa, Homo sapiens
MVLPFMIVFLLISSLLNFAYIAKILNDYKMKNDTVWDLNMYKSEYFIKQILLNLGVIFFFTLSLITCIFLIISLWRHNRQMQSNVTGLRDSNTEAHVKAMKVLISFIILFILYFIGMAIEISCFTVRENKLLLMFGMTTTAIYPWGHSFILILGNSKLKQASLRVLQQLKCCEKRKNLRVT

SEQ ID NO: 690 - protein, 70 aa, Homo sapiens
AAMRRWASSSLEGEELSTQRDLTRKVHPPSTQEAPADSMCFRLCWPNGLCRDYSALPLWLQSDHRPSESE

SEQ ID NO: 691 - protein, 88 aa, Homo sapiens
  SITE (63): Xaa equals any of the naturally occurring L-amino acids
  SITE (73): Xaa equals any of the naturally occurring L-amino acids
MPVGSLPHPGCLWAAFLTLDACGLPSSPWMPVGSLPHPGCLWAAFLTLDACGQPSSPWMPVGXLLTLDACGQXSSPGCLWAAFLTWSL

SEQ ID NO: 692 - protein, 190 aa, Homo sapiens [sequence omitted]

SEQ ID NO: 693 - protein, 38 aa, Homo sapiens
MWLSPVPGVCAAVLALSFWIAKFPGEGTAIAKALGRLK

SEQ ID NO: 694 - protein, 38 aa, Homo sapiens; identical to SEQ ID NO: 693

SEQ ID NO: 695 - protein, 26 aa, Homo sapiens
GLFLGQMNWIFSCCFSNNVTTTVKKR

SEQ ID NO: 696 - protein, 166 aa, Homo sapiens [sequence omitted]

SEQ ID NO: 697 - protein, 166 aa, Homo sapiens [sequence omitted]

SEQ ID NO: 698 - protein, 61 aa, Homo sapiens
MVLINSGKPGSKCCWVFRPGLSAPCSALWWGCPGLALSLSGPQVRLFTRRYETTLPNTGPW

SEQ ID NO: 699 - protein, 54 aa, Homo sapiens
MLLGLQARLVSSLLCSVVGCLGCSFFCPRRYYKKLNLHKACMENSVSAEIRSDR

SEQ ID NO: 700 - protein, 240 aa, Homo sapiens
MSRYLLPLSALGTVAGAAVLLKDYVTGGACPSKATIPGKTVIVTGANTGIGKQTALELARRGGNIILACRDMEKCEAAAKDIRGETLNHHVNARHLDLASLKSIREFAAKIIEEEERVDILINNAGVMRCPHWTTEDGFEMQFGVNHLGHFLLTNLLLDKLKASAPSRIINLSSLAHVAGHIDFDDLNWQTRKYNTKAAYCQSKLAIVLFTKELSRRLQGTGALGSASLLLYSEPRAAFP

SEQ ID NO: 701 - protein, 246 aa, Homo sapiens
  SITE (222): Xaa equals any of the naturally occurring L-amino acids
  SITE (223): Xaa equals any of the naturally occurring L-amino acids
  SITE (236): Xaa equals any of the naturally occurring L-amino acids
  SITE (242): Xaa equals any of the naturally occurring L-amino acids
  SITE (244): Xaa equals any of the naturally occurring L-amino acids
MGAAVFFGCTFVAFGPAFALFLITVAGDPLRVIILVAGAFFWLVSLLLASVVWFILVHVTDRSDARLQYGLLIFGAAVSVLLQEVFRFAYYKLLKKADEGLASLSEDGRSPISIRQMAYVSGLSFGIISGVFSVINILADALGPGVVGIHGDSPYYFLTSAFLTAAIILLHTFWGVVFFDACERRRYWALGLVVGSHLLTSGLTFLNPWYEASLLPSMQSLXXWGSGPSSQLEGPXKYSAQXLXKD

SEQ ID NO: 702 - protein, 5 aa, Homo sapiens
GEIFL

SEQ ID NO: 703 - protein, 84 aa, Homo sapiens
KMHFNKNKSILKSFSFVRGNMNEIHSYLKTEYFTAKTLNISRAYHILNTLWSCSYFNIPGSGGQLACLWLRICFHACFLSFFYL

SEQ ID NO: 704 - protein, 5 aa, Homo sapiens
VLLIL

SEQ ID NO: 705 - protein, 266 aa, Homo sapiens
  SITE (45): Xaa equals any of the naturally occurring L-amino acids
  SITE (47): Xaa equals any of the naturally occurring L-amino acids
  SITE (51): Xaa equals any of the naturally occurring L-amino acids
  SITE (134): Xaa equals any of the naturally occurring L-amino acids
  SITE (183): Xaa equals any of the naturally occurring L-amino acids
  SITE (222): Xaa equals any of the naturally occurring L-amino acids
  SITE (224): Xaa equals any of the naturally occurring L-amino acids
  SITE (255): Xaa equals any of the naturally occurring L-amino acids
MPRHLSGLLLLLWPLLLLLPPTPAAPGPLARPGLRRLGTRGPGGXPXRRPXSAVPTRAPYSGAGQPGGARGAGVCRSRPLDLVFIIDSSRSVRPLEFTKVKTFVSQIIDTLDIGAADTRVAVVNYASTVKIEFXLQTHSDKQSLKQAVARITPLSTGTMSGLAIQTAMDEAFTVEAGARGPTXNIPKVAIIVTDGRPQDQVNEVAARARASGIELYAVGVDXAXMESLQDEWPAKPLDEHVFYVETYGVIEKPSXRFQETLLRSWN

SEQ ID NO: 706 - protein, 484 aa, Homo sapiens
MPRHLSGLLLLLWPLLLLLPPTPAAPGPLARPGLRRLGTRGPGGSPGRRPGSAVPTRAPYSGAGQPGGARGAGVCRSRPLDLVFIIDSSRSVRPLEFTKVKTFVSQIIDTLDIGAADTRVAVVNYASTVKIEFHLQTHSDKQSLKQAVARITPLSTGTMSGLAIQTAMDEAFTVEAGARGPTSNIPKVAIIVTDGRPQDQVNEVAARARASGIELYAVGVDRADMESLKMMASEPLDEHVFYVETYGVIEKLSSRFQETFCALDPCVLGTHRCQHVCVSDGEGKHHCECSQGYSLNADQKTCSAIDKCALNTHGCEHICVNDRTGSYHCECYEGYTLNQDRKTCSAQDQCAFGTHGCQHICVNDRDGSHHCECYEGYTLNADNKTCSVRSECAGGSHGCQHLCVDDGPAAYHCDCFPGYTLTEDRRTCAAIEEARRLVSTEDACGCEATLAFQERASSYLQRLNAKLDDILGKLQADAYGQIHR

SEQ ID NO: 707 - protein, 368 aa, Homo sapiens
  SITE (310): Xaa equals any of the naturally occurring L-amino acids
  SITE (365): Xaa equals any of the naturally occurring L-amino acids
MQPSSLLPLALCLLAAPASALVRIPLHKFTSIRRTMSEVGGSVEDLIAKGPVSKYSQAVPAVTEGPIPEVLKNYMDAQYYGEIGIGTPPQCFTVVFDTGSSNLWVPSIHCKLLDIACWIHHKYNSDKSSTYVKNGTSFDIHYGSGSLSGYLSQDTVSVPCQSASSASALGGVKVERQVFGEATKQPGITFIAAKFDGILGMAYPRISVNNVLPVFDNLMQQKLVDQNIFSFYLSRDPDAQPGGELMLGGTDSKYYKGSLSYLNVTRKAYWQVHLDQVEVASGLTLCKEGCEAIVDTGTSLMVGPVDEVRXLQKAIGAVPLIQGEYMIPCEKVSTLPAITLKLGGKGYKLSPEDYTLKVSQAGKTXCLS

SEQ ID NO: 708 - protein, 92 aa, Homo sapiens
  SITE (43): Xaa equals any of the naturally occurring L-amino acids
  SITE (69): Xaa equals any of the naturally occurring L-amino acids
  SITE (70): Xaa equals any of the naturally occurring L-amino acids
LVVLGVCAAQHELTPRLRAGVPVQVEREDVLLHQLLLHQVIKXGKHIVDRDAGVGHAQDAVELGRDEGXXRLLGGFPERLPLHLDASQARQT

SEQ ID NO: 709 - protein, 115 aa, Homo sapiens
  SITE (50): Xaa equals any of the naturally occurring L-amino acids
  SITE (70): Xaa equals any of the naturally occurring L-amino acids
  SITE (86): Xaa equals any of the naturally occurring L-amino acids
  SITE (100): Xaa equals any of the naturally occurring L-amino acids
MQPPSLLLLVLGLLAAPAAALVRIPLHKFTSVRRTMSELGGPVEDLIARXPISKYAQGVPSVAGGPVPEXLKETTWNAQILRGKFXHPGTPPRKLLPPVXPFEKRGSFPTLLGSP

SEQ ID NO: 710 - protein, 410 aa, Homo sapiens
MQPPSLLLLVLGLLAAPAAALVRIPLHKFTSVRRTMSELGGPVEDLIARGPISKYAQGVPSVAGGPVPEVLRNYMDAQYYGEIGIGTPPQCFTVVFDTGSSNLWVPSIHCKLLDIACWIHHKYNSGKSSTYVKNGTSFDIHYGSGSLSGYLSQDTVSVPCKSGLSSLAGVKVERQTFGEATKQPGITFIAAKFDGILGMAYPRISVNNVLPVFDNLMQQKLVEKNIFSFYLNRDPGAQPGGELMLGGTDSKYYKGPLSYLNVTRKAYWQVHMEQVDVGSSLTLCKGGCEAIVDTGTSLIVGPVDEVRELQKAIGAVPLIQGEYMIPCEKVSTLPEVTLTLGGKPYKLSSEDYTLKVSQGGKSICLSGFMGMDIPPPGGPLWILGDVFIGRYYTVFDRDQNRVGLAEATRL

SEQ ID NO: 711 - protein, 96 aa, Homo sapiens
  SITE (25): Xaa equals any of the naturally occurring L-amino acids
  SITE (77): Xaa equals any of the naturally occurring L-amino acids
  SITE (79): Xaa equals any of the naturally occurring L-amino acids
AAREGAPPPCPTSAIGRASLSLRDXGRGLRDARREKRRGVRGQDGGDYGWCGPARGRGVAAKGTAEGPTGENRAQGXKXGVRVAVEASSVRGPGRA

SEQ ID NO: 712 - protein, 453 aa, Homo sapiens
  SITE (432): Xaa equals any of the naturally occurring L-amino acids
MRMASIMVWVMIIMVILVLGYGIFHCYMEYSRLRGEAGSDVSLVDLGFQTDFRVYLHLRQTWLAFMIILSILEVIIILLLIFLRKRILIAIALIKEASRAVGYVMCSLLYPLVTFFLLCLCIAYWASTAVFLSTSNEAVYKIFDDSPCPFTAKTCNPETFPSSNESRQCPNARCQFAFYGGESGYHRALLGLQIFNAFMFFWLANFVLALGQVTLAGAFASYYWALRKPDDLPAFPLFSAFGRALRYHTGSLAFGALILAIVQIIRVILEYLDQRLKAAENKFAKCLMTCLKCCFWCLEKFIKFLNRNAYIMIAIYGTNFCTSARNAFFLLMRNIIRVAVLDKVTDFLFLLGKLLIVGSVGILAFFFFTHRIRIVQDTAPPLNYYWVPILTVIVGSYLIAHGFFSVYGMCVDTLFLCFLEDLERNDGSAERXYFMSSTLKKLLNKTNKKAAES

SEQ ID NO: 713 - protein, 453 aa, Homo sapiens
MRMASIMVWVMIIMVILVLGYGIFHCYMEYSRLRGEAGSDVSLVDLGFQTDFRVYLHLRQTWLAFMIILSILEVIIILLLIFLRKRILIAIALIKEASRAVGYVMCSLLYPLVTFFLLCLCIAYWASTAVFLSTSNEAVYKIFDDSPCPFTAKTCNPETFPSSNESRQCPNARCQFAFYGGESGYHRALLGLQIFNAFMFFWLANFVLALGQVTLAGAFASYYWALRKPDDLPAFPLFSAFGRALRYHTGSLAFGALILAIVQIIRVILEYLDQRLKAAENKFAKCLMTCLKCCFWCLEKFIKFLNRNAYIMIAIYGTNFCTSARNAFFLLMRNIIRVAVLDKVTDFLFLLGKLLIVGSVGILAFFFFTHRIRIVQDTAPPLNYYWVPILTVIVGSYLIAHGFFSVYGMCVDTLFLCFLEDLERNDGSAERPYFMSSTLKKLLNKTNKKAAES

SEQ ID NO: 714 - protein, 84 aa, Homo sapiens
  SITE (56): Xaa equals any of the naturally occurring L-amino acids
GRPTRPLSAQNASVNFWEASTLAAQRELAMQFLCPGNHCFPCHLLCAQKRYNSHQXTPVVTAHLVCCVFQQSVLLGVQLNRLGV

SEQ ID NO: 715 - protein, 32 aa, Homo sapiens
MWWALLACRFCCPRRCASAWQGLPRRGALFSG

SEQ ID NO: 716 - protein, 53 aa, Homo sapiens
  SITE (26): Xaa equals any of the naturally occurring L-amino acids
MWWALLALPFLLPTALRLCLAGLPHXFRHTNRMVPQWHQSGDRPLHSHPHSRF

SEQ ID NO: 717 - protein, 744 aa, Homo sapiens
MWWALLALPFLLPTALRLCLAGPPPERGPLFWLTRQDSRESGAANATVSPCEGLPSAGASTLTLANRSLERLPNCLPPALRSLDASHNLLRALSAPELGALPRLQALTLRHNRIAELRWGPGGPAALHTLDLSYNQLATLPPCAGPALPGLRSLALAGNPLQALQPGAFACLPALRLLNLSGTALGRDLGAGIADGAFAGAGGALEVLDLSGTFLERVRSGWIRDLPKLTSLHLRKMPRLRILEAAVFKMTPNLQQLDCQDSSALTSVHTQLFQDTPRLQVLLFQNCNLSSFPPWSLHSSQVLSISLFGNPLICSCELSWLLRDAKRTVLSRAADTVCVPASGSRDTFSAPLSLSQLPTVCHLDQSTTLHSSSPQAVPFTHQPSTQGLTTPWSTAPSTRPVEAEQSVTKPLSFPTDSATQTAWSHSGIKVGTARSTAIPTADSSTSSAPRRAANTAGAEHQEHAPMLVHAPHVSAASTPSASKHPGLFPTPWSQVRTPQPDYRAQATLQAPHPSPSEGAIPVLLLDESSEEEEEGQKEEVGAPPQDVPCDYHPCKHLQTPCAELQRRSRCRCPGLSGEDSLPDPPRLQAVTETTDTSALVRWCAPNSVVHGYQIHYSPEGWAENQSVTVVADIYATARQHPLYGLSPGTMYRVCVLAANRAGLSQPVQASGWTRACAAFTTKPSFVLVFAGLCAACGLLLVTTLLLAACLCRRSRTVRLQRYNTHLVAYKNPAFDYPLKLQTLS

SEQ ID NO: 718 - protein, 153 aa, Homo sapiens
AIHFTQQDMPQIRRQIYKELCHANSLCERRIPGLKPMVKGMGTWGTLPSRETPVPLLPLPLPVPYGFSYLNVLIDFCIFFSLREYLLIFDVQGVAMEQPLLPLLGRSLALWPGWGGHPPSRVQGRGQEHLCWGGGRAKGVCLPDIQTLFYTYI

SEQ ID NO: 719 - protein, 46 aa, Homo sapiens
MRMKMRKRKWQLGGCPPDGVSWELPSGLVLPALLIEKPAPSAAAEP

SEQ ID NO: 720 - protein, 99 aa, Homo sapiens
GVSWEGTPMSPFPFMGLGSGVRGSHSEFAVTQLLVDLPTKFGHVLLGEAEWLRQGQMLAVLQHKSTTVTVIILPGHIHFEVTFPALVEIQSVFLYRLCL

SEQ ID NO: 721 - protein, 90 aa, Homo sapiens
MDYGGLQSLLWTLTLASSPVLFPMALGDPPGQKGSGVWHPLMPASSSAMCAASGTMWPRSYFRAQIWAPQKRQSGPGRKPASTAPCGRSM

SEQ ID NO: 722 - protein, 288 aa, Homo sapiens
  SITE (10): Xaa equals any of the naturally occurring L-amino acids
  SITE (15): Xaa equals any of the naturally occurring L-amino acids
  SITE (268): Xaa equals any of the naturally occurring L-amino acids
  SITE (271): Xaa equals any of the naturally occurring L-amino acids
  SITE (273): Xaa equals any of the naturally occurring L-amino acids
  SITE (274): Xaa equals any of the naturally occurring L-amino acids
  SITE (276): Xaa equals any of the naturally occurring L-amino acids
  SITE (286): Xaa equals any of the naturally occurring L-amino acids
FSSSACPSVXSLFVXLGKNPHDAQGHPRASEDQPSSGKPVTSYPGECGFVFTKEASLEIRDMLLANKVPAAARAGAIAPCEVTVPAQNTGLGPEKTSFFQALGITTKISRGTIEILSDVQLIKTGDKVGASEATLLNMLNISPFSFGLIIQQVFDNGSIYNPEVLDITEETLHSRFLEGVRNVASVCLQIGYPTVASVPHSIINGYKRVLALSVETDYTFPLAEKVKAFLADPSAFVAAAPVAAATTAAPAAAAAPAKVEAKEESEEXDEXIXXSXISKSNNSSQXIV

SEQ ID NO: 723 - protein, 112 aa, Homo sapiens
  SITE (71): Xaa equals any of the naturally occurring L-amino acids
  SITE (103): Xaa equals any of the naturally occurring L-amino acids
  SITE (112): Xaa equals any of the naturally occurring L-amino acids
MKTLLLLVGLLLTWENGRVLGDQMVSDTELQEMSTEGSKYINREIKNALKGVKQIKTLIEQTNEERKSLLXNLEEAKKKKEDALNDTKDSEMKLKASPGVFNXTLDGPLGGX

SEQ ID NO: 724 - protein, 14 aa, Homo sapiens
LLLVGLQQLVVQAW

SEQ ID NO: 725 - protein, 7 aa, Homo sapiens
LLVVLLS

SEQ ID NO: 726 - protein, 139 aa, Homo sapiens
MKTLLLLVGLLLTWENGRVLGDQMVSDTELQEMSTEGSKYINREIKNALKGVKQIKTLIEQTNEERKSLLTNLEEAKKKKEDALNDTKDSEMKLKASQGVCNDTMMALWEECKPCLKQTWGKGLRPSLQKQHRAGWPPG

SEQ ID NO: 727 - protein, 112 aa, Homo sapiens
  SITE (103): Xaa equals any of the naturally occurring L-amino acids
  SITE (112): Xaa equals any of the naturally occurring L-amino acids
MKTLLLLVGLLLTWENGRVLGDQMVSDTELQEMSTEGSKYINREIKNALKGVKQIKTLIEQTNEERKSLLTNLEEAKKKKEDALNDTKDSEMKLKASPGVFNXTLDGPLGGX

SEQ ID NO: 728 - protein, 6 aa, Homo sapiens
MLLLYL

SEQ ID NO: 729 - protein, 14 aa, Homo sapiens
PQGPNDVTAKLLCP

SEQ ID NO: 730 - protein, 67 aa, Homo sapiens
MAPSGPLLLVLLVPLAAARPGPTSVPAGAAACPCGGTSCRGWGAGPTPGRTSTCPHLTCPRAGTGAT

SEQ ID NO: 731 - protein, 129 aa, Homo sapiens
MAPSGPLLLVLLVPLAAARAGPYFRPGRGCRLPLRGDQLSGLGRRTYPRPHEYLSPSDLPKSWDWRNVNGVNYASATRNQHIPQYCGSCWAHGSTSAMAGPDQHQEKGGVALHPAVRAARPRLRQRGLL

SEQ ID NO: 732 - protein, 208 aa, Homo sapiens
MGLGARGAWAALLLGTLQVLALLGAAHESAAMAASANIENSGLPHNSSANSTETLQHVPSDHTNETSNSTVKPPTSVASDSSNTTVTTMKPTAASNTTTPGMVSTNMTSTTLKSTPKTTSVSQNTSQISTSTMTVTHNSSVTSAASSVTITTTMHSEAKKGSKFDTGSFVGGIVLTLGVLSILYIGCKMYYSRRGIRYRTIDEHDAII

SEQ ID NO: 733 - protein, 208 aa, Homo sapiens; identical to SEQ ID NO: 732

SEQ ID NO: 734 - protein, 208 aa, Homo sapiens; identical to SEQ ID NO: 732

SEQ ID NO: 735 - protein, 208 aa, Homo sapiens; identical to SEQ ID NO: 732

SEQ ID NO: 736 - protein, 365 aa, Homo sapiens
  SITE (144): Xaa equals any of the naturally occurring L-amino acids
  SITE (201): Xaa equals any of the naturally occurring L-amino acids
MFVGLMAFLLSFYLIFTNEGRALKTATSLAEGLSLVVSPDSIHSVAPENEGRLVHIIGALRTSKLLSDPNYGVHLPAVKLRRHVEMYQWVETEESREYTEDGQVKKETRYSYNTEWRSEIINSKNFDREIGHKNPSAMAVESFXATAPFVQIGRFFLSSGLIDKVDNFKSLSLSKLEDPHVDIIRRGDFFYHSENPKYPEXGDLRVSFSYAGLSGDDPDLGPAHVVTVIARQRGDQLVPFSTKSGDTLLLLHHGDFSAEEVFHRELRSNSMKTWGLRAAGWMAMFMGLNLMTRILYTLVDWFPVFRDLVNIGLKAFAFCVATSLTLLTVAAGWLFYRPLWALLIAGLALVPILVARTRVPAKKLE

SEQ ID NO: 737 - protein, 365 aa, Homo sapiens
MFVGLMAFLLSFYLIFTNEGRALKTATSLAEGLSLVVSPDSIHSVAPENEGRLVHIIGALRTSKLLSDPNYGVHLPAVKLRRHVEMYQWVETEESREYTEDGQVKKETRYSYNTEWRSEIINSKNFDREIGHKNPSAMAVESFMATAPFVQIGRFFLSSGLIDKVDNFKSLSLSKLEDPHVDIIRRGDFFYHSENPKYPEVGDLRVSFSYAGLSGDDPDLGPAHVVTVIARQRGDQLVPFSTKSGDTLLLLHHGDFSAEEVFHRELRSNSMKTWGLRAAGWMAMFMGLNLMTRILYTLVDWFPVFRDLVNIGLKAFAFCVATSLTLLTVAAGWLFYRPLWALLIAGLALVPILVARTRVPAKKLE

SEQ ID NO: 738 - protein, 34 aa, Homo sapiens
MLWPCCPSPLPIWASPSPRLTWWCLLSCFGTQGC

SEQ ID NO: 739 - protein, 34 aa, Homo sapiens; identical to SEQ ID NO: 738

SEQ ID NO: 740 - protein, 41 aa, Homo sapiens
MRHCCWLWSSCMLWEPSTTLGSSPRLVERWQSCRWTPCCPK

SEQ ID NO: 741 - protein, 41 aa, Homo sapiens; identical to SEQ ID NO: 740

SEQ ID NO: 742 - protein, 18 aa, Homo sapiens
VHKSAGLLWEATGEGPGS

SEQ ID NO: 743 - protein, 197 aa, Homo sapiens
VEIVHELKGEGKAQRKISAIHILDVLVLNGTDVREQHFNQRIQLAEKFVKAVSKPSRPDMNPIRVKEVYRLEEMEKIFVRLEMKIIKGSSGTPKLSYTGRDDRHFVPMGLYIVRTVNEPWTMGFSKSFKKKFFYNKKTKDSTFDLPADSIAPFHICYYGRLFWEWGDGIRVHDSQKPQDQDKLSKEDVLSFIQMHRA

SEQ ID NO: 744 - protein, 1 aa, Homo sapiens
N

SEQ ID NO: 745 - protein, 61 aa, Homo sapiens
  SITE (58): Xaa equals any of the naturally occurring L-amino acids
MHSKQTLLWKELLLAIPCIIASPRSLWPRWASGKVKDWVNTARVGRTSLRLPVRKVEXAWV

SEQ ID NO: 746 - protein, 61 aa, Homo sapiens
MHSKQTLLWKELLLAIPCIIASPRSLWPRWASGKVKDWVNTARVGRTSLRLPVRKVEEAWV

SEQ ID NO: 747 - protein, 53 aa, Homo sapiens
NYNRGGTFLYQKAKIKHHVLMVFYKSTSNSTESLIWSLLNSWSDKVTFPKRVR

SEQ ID NO: 748 - protein, 56 aa, Homo sapiens
  SITE (35): Xaa equals any of the naturally occurring L-amino acids
  SITE (42): Xaa equals any of the naturally occurring L-amino acids
  SITE (46): Xaa equals any of the naturally occurring L-amino acids
KSQMQSFTIVTAYGRCLSLTCLPTLNQMLVFKSNXSLVSPHXLTFXNIFARFENFQ

SEQ ID NO: 749 - protein, 11 aa, Homo sapiens
FLVCLLLGPRS

SEQ ID NO: 750 - protein, 6 aa, Homo sapiens
TVAIYD

SEQ ID NO: 751 - protein, 46 aa, Homo sapiens
  SITE (45): Xaa equals any of the naturally occurring L-amino acids
INHVFIWGSIAIYFSILFTMHSNGIFGIFPNQFPFVGNARHSLTXK

SEQ ID NO: 752 - protein, 109 aa, Homo sapiens
  SITE (94): Xaa equals any of the naturally occurring L-amino acids
MNTLVLWIFGFLICLGIILAIGNSIWESQTGDQFRTFLFWNEGEKSSVFSGFLTFWSYIIILNTVVPISLYVSVEVIRLGHSYFINWDRKMYYXRKAIPAVARTTTLNE

SEQ ID NO: 753 - protein, 937 aa, Homo sapiens
MQNSGKTKFKRTSIDRLMNTLVLWIFGFLICLGIILAIGNSIWESQTGDQFRTFLFWNEGEKSSVFSGFLTFWSYIIILNTVVPISLYVSVEVIRLGHSYFINWDRKMYYSRKAIPAVARTTTLNEELGQIEYIFSDKTGTLTQNIMTFKRCSINGRIYGEVHDDLDQKTEITQEKEPVDFSVKSQADREFQFFDHNLMESIKMGDPKVHEFLRLLALCHTVMSEENSAGELIYQVQSPDEGALVTAARNFGFIFKSRTPETITIEELGTLVTYQLLAFLDFNNTRKRMSVIVRNPEGQIKLYSKGADTILFEKLHPSNEVLLSLTSDHLSEFAGEGLRTLAIAYRDLDDKYFKEWHKMLEDANVATEERDERIAGLYEEIERDLMLLGATAVEDKLQEGVIETVTSLSLANIKIWVLTGDKQETAINIGYACNMLTDDMNDVFVIAGNNAVEVREELRKAKQNLFGQNRNFSNGHVVCEKKQQLELDSIVEETITGDYALIINGHSLAHALESDVKNDLLELACMCKTVICCRVTPLQKAQVVELVKKYRNAVTLAIGDGANDVSMIKSAHIGVGISGQEGLQAVLASDYSFAQFRYLQRLLLVHGRWSYFRMCKFLCYFFYKNFAFTLVHFWFGFFCGFSAQTVYDQWFITLFNIVYTSLPVLAMGIFDQDVSDQNSVDCPQLYKPGQLNLLFNKRKFFICVMHGIYTSLVLFFIPYGAFYNVAGEDGQHIADYQSFAVTMATSLVIVVSVQIALDTSYWTFINHVFIWGSIAIYFSILFTMHSNGIFGIFPNQFPFVGNARHSLTQKCIWLVILLTTVASVMPVVAFRFLKVDLYPTLSDQIRRWQKAQKKARPPSSRRPRTRRSSSRRSGYAFAHQEGYGELITSGKNMRAKNPPPTSGLEKTHYNSTSWIENLCKKTTDTVSSFSQDKTVKL

SEQ ID NO: 754 - protein, 45 aa, Homo sapiens
INSCNIKGLKCFYIVFGCLLLVPISDKLYGLLHLIPFIWRVLLPC

SEQ ID NO: 755 - protein, 137 aa, Homo sapiens
MKLLVILLFSGLITGFRSDSSSSLPPKLLLVSFDGFRADYLKNYEFPHLQNFIKEGVLVEHVKNVFITKTFPNHYSIVTGLYEESHGIVANSMYDAVTKKHFSDSNDKDPFWWNEAVPIWVTNQLQETDQVAAAMWA

SEQ ID NO: 756 - protein, 6 aa, Homo sapiens
KMMMIL

SEQ ID NO: 757 - protein, 101 aa, Homo sapiens
  SITE (97): Xaa equals any of the naturally occurring L-amino acids
SFSFKVVDVFEVSKIVAEYFILGPCNGVSFNDCIIVIGGYEFQKSILGIQLMSGFYIGWNRKVCPVSILTLSTRHLPICLSLRSQNINSNCKLSKNXKSIC

SEQ ID NO: 758 - protein, 12 aa, Homo sapiens
LLTILLWSALSY

SEQ ID NO: 759 - protein, 453 aa, Homo sapiens
MKLLVILLFSGLITGFRSDSSSSLPPKLLLVSFDGFRADYLKNYEFPHLQNFIKEGVLVEHVKNVFITKTFPNHYSIVTGLYEESHGIVANSMYDAVTKKHFSDSNDKDPFWWNEAVPIWVTNQLQENRSSAAAMWPGTDVPIHDTISSYFMNYNSSVSFEERLNNITMWLNNSNPPVTFATLYWEEPDASGHKYGPEDKENMSRVLKKIDDLIGDLVQRLKMLGLWENLNVIITSDHGMTQCSQDRLINLDSCIDHSYYTLIDLSPVAAILPKINRTEVYNKLKNCSPHMNVYLKEDIPNRFYYQHNDRIQPIILVADEGWTIVLNESSQKLGDHGYDNSLPSMHPFLAAHGPAFHKGYKHSTINIVDIYPMMCHILGLKPHPNNGTFGHTKCLLVDQWCINLPEAIAIVIGSLLVLTMLTCLIIIMQNRLSVPRPFSRLQLQEDDDDPLIG

SEQ ID NO: 760 - protein, 11 aa, Homo sapiens
WHILQMKGLTW

SEQ ID NO: 761 - protein, 31 aa, Homo sapiens
FAIFIYFSVSYIADGNEFEVPRAEDPCLLCF

SEQ ID NO: 762 - protein, 245 aa, Homo sapiens
  SITE (110): Xaa equals any of the naturally occurring L-amino acids
MRIFAVFIFMTYWHLLNAFTVTVPKDLYVVEYGSNMTIECKFPVEKQLDLAALIVYWEMEDKNIIQFVHGEEDLKVQHSSYRQRARLLKDQLSLGNAALQITDVKLQDAXVYRCMISYGGADYKRITVKVNAPYNKINQRILVVDPVTSEHELTCQAEGYPKAEVIWTSSDHQVLSGKTTTTNSKREEKLFNVTSTLRINTTTNEIFYCTFRRLDPEENHTAELVIPGNILNVSIKICLTLSPST

SEQ ID NO: 763 - protein, 290 aa, Homo sapiens
MRIFAVFIFMTYWHLLNAFTVTVPKDLYVVEYGSNMTIECKFPVEKQLDLAALIVYWEMEDKNIIQFVHGEEDLKVQHSSYRQRARLLKDQLSLGNAALQITDVKLQDAGVYRCMISYGGADYKRITVKVNAPYNKINQRILVVDPVTSEHELTCQAEGYPKAEVIWTSSDHQVLSGKTTTTNSKREEKLFNVTSTLRINTTTNEIFYCTFRRLDPEENHTAELVIPELPLAHPPNERTHLVILGAILLCLGVALTFIFRLRKGRMMDVKKCGIQDTNSKKQSDTHLEET

SEQ ID NO: 764 - protein, 91 aa, Homo sapiens
  SITE (40): Xaa equals any of the naturally occurring L-amino acids
SVSKKKKKKKVFCILYKLVVVGSRGLSTDDLMRSVSRFAXSQTFVLLNSSSFFSFLETESSSVTRLECSGTIKAYCSLYLPGSRNPPTLAS

SEQ ID NO: 765 - protein, 53 aa, Homo sapiens
MVYCVVSPRRATLFCVLLLGTRCEIISVRSSFGEYDKINSILKGLLKIPFNEF

SEQ ID NO: 766 - protein, 95 aa, Homo sapiens
PPRTRLFLVILFCCFRRNDTSFCFFEEKVFHVTVARTNTKRSRLQMLQACAVVCVCVCVCVCVCTYIYGKHIYCCAARGKPAKKCVCLYEMFEKR

SEQ ID NO: 767 - protein, 53 aa, Homo sapiens; identical to SEQ ID NO: 765

SEQ ID NO: 768 - protein, 41 aa, Homo sapiens
MPSGCRCLHLVCLLCILGAPGQPVRADDCSPTVTWPTAAVN

SEQ ID NO: 769 - protein, 20 aa, Homo sapiens
PGLCSQLHVPLLGGLCGCPL

SEQ ID NO: 770 - protein, 383 aa, Homo sapiens
MPSGCRCLHLVCLLCILGAPGQPVRADDCSSHCDLAHGCCAPDGSCRCDPGWEGLHCERCVRMPGCQHGTCHQPWQCICHSGWAGKFCDKDEHICTTQSPCQNGGQCMYDGGGEYHCVCLPGFHGRDCERKAGPCEQAGSPCRNGGQCQDDQGFALNFTCRCLVGFVGARCEVNVDDCLMRPCANGATCLDGINRFSCLCPEGFAGRFCTINLDDCASRPCQRGARCRDRVHDFDCLCPSGYGGKTCELVLPVPDPPTTVDTPLGPTSAVVVPATGPAPHSAGAGLLRISVKEVVRRQEAGLGEPSLVALVVFGALTAALVLATVLLTLRAWRRGVCPPGPCCYPAPHYAPACQDQECQVSMLPAGLPLPRDLPPEPGKTTAL

SEQ ID NO: 771 - protein, 10 aa, Homo sapiens
PQTAGPQKCA

SEQ ID NO: 772 - protein, 10 aa, Homo sapiens
PFPAGPHSWI

SEQ ID NO: 773 - protein, 35 aa, Homo sapiens
MGRGPWDAGPSRRLLPLLLLLGLARGAAERRAPTV

SEQ ID NO: 774 - protein, 747 aa, Homo sapiens
MGRGPWDAGPSRRLLPLLLLLGLARGAAGAPGPDGLDVCATCHEHATCQQREGKKICICNYGFVGNGRTQCVDKNECQFGATLVCGNHTSCHNTPGGFYCICLEGYRATNNNKTFIPNDGTFCTDIDECEVSGLCRHGGRCVNTHGSFECYCMDGYLPRNGPEPFHPTTDATSCTEIDCGTPPEVPDGYIIGNYTSSLGSQVRYACREGFFSVPEDTVSSCTGLGTWESPKLHCQEINCGNPPEMRHAILVGNHSSRLGGVARYVCQEGFESPGGKITSVCTEKGTWRESTLTCTEILTKINDVSLFNDTCVRWQINSRRINPKISYVISIKGQRLDPMESVREETVNLTTDSRTPEVCLALYPGTNYTVNISTAPPRRSMPAVIGFQTAEVDLLEDDGSFNISIFNETCLKLNRRSRKVGSEHMYQFTVLGQRWYLANFSHATSFNFTTREQVPVVCLDLYPTTDYTVNVTLLRSPKRHSVQITIATPPAVKQTISNISGFNETCLRWRSIKTADMEEMYLFHIWGQRWYQKEFAQEMTFNISSSSRDPEVCLDLRPGTNYNVSLRALSSELPVVISLTTQITEPPLPEVEFFTVHRGPLPRLRLRKAKEKNGPISSYQVLVLPLALQSTFSCDSEGASSFFSNASDADGYVAAELLAKDVPDDAMEIPIGDRLYYGEYYNAPLKRGSDYCIILRITSEWNKVRRHSCAVWAQVKDSSLMLLQMAGVGLGSLAVVIILTFLSFSAV

SEQ ID NO: 775 - protein, 45 aa, Homo sapiens
TWWPPCPPAPMGQVGSCFAGLCGQHTRGLHGWPQPSPAAPQMRSC

SEQ ID NO: 776 - protein, 17 aa, Homo sapiens
GWCSRRDSCWPSPPTMP

SEQ ID NO: 777 - protein, 120 aa, Homo sapiens
  SITE (103): Xaa equals any of the naturally occurring L-amino acids
MGTVSSRRSWWPLPLLLLLLLLLGPAGARAQEDEDGDYEELVLALRSEEDGLAEAPEHGTTATFHRCAKDPWRLPGTYVVVLKEETHLSQSERTARRLQAQAXRRGYLPRSCMSSMAFFL

SEQ ID NO: 778 - protein, 269 aa, Homo sapiens
  SITE (236): Xaa equals any of the naturally occurring L-amino acids
  SITE (257): Xaa equals any of the naturally occurring L-amino acids
MGTVSSRRSWWPLPLLLLLLLLLGPAGARAQEDEDGDYEELVLALRSEEDGLAEAPEHGTTATFHRCAKDPWRLPGTYVVVLKEETHLSQSERTARRLQAQAARRGYLTKILHVFHGLLPGFLVKMSGDLLELALKLPHVDYIEEDSSVFAQSIPWNLERITPPRYRADEYQPPDGGSLVEVYLLDTSIQSDHREIEGRVMVTDFENVPEEDGTRFHRQASKCDSHGPTWQGWSAXGMPAWPRVPACAACACFPKKXPLLGGPPQKKGG

SEQ ID NO: 779 - protein, 107 aa, Homo sapiens
  SITE (92): Xaa equals any of the naturally occurring L-amino acids
MVRYTYSMLSVIGISYAVLTWLSQTLWMPIYPLCVLAEAFAIYQSLPYFESFGTYSTKLPFDLSIYFPYVLKIYLMMLFIGMYFTYSHLYSXRRDILGIFPIKKKKM

SEQ ID NO: 780 - protein, 37 aa, Homo sapiens
MVRYTYSMLSVIGISYAVLTWAQSNTMDANLSFVCSC

SEQ ID NO: 781 - protein, 107 aa, Homo sapiens
MVRYTYSMLSVIGISYAVLTWLSQTLWMPIYPLCVLAEAFAIYQSLPYFESFGTYSTKLPFDLSIYFPYVLKIYLMMLFIGMYFTYSHLYSERRDILGIFPIKKKKM

SEQ ID NO: 782 - protein, 53 aa, Homo sapiens
  SITE (40): Xaa equals any of the naturally occurring L-amino acids
SNPSHILMISILLSHASRGAGADPKRSCCPQRVGSRGRAXVRLTRLCSQPSPH

SEQ ID NO: 783 - protein, 33 aa, Homo sapiens
HHVAQALPPAGAPRGRPHQPHPAPVGQGSPERG

SEQ ID NO: 784 - protein, 74 aa, Homo sapiens
MGFHHVSQAALVLLLLLLLLLLFDTESRSSLATERDSISKKKNKKTKKKNRKETKNVVLILINSNSFMWLAAAL

SEQ ID NO: 785 - protein, 74 aa, Homo sapiens; identical to SEQ ID NO: 784

SEQ ID NO: 786 - protein, 178 aa, Homo sapiens
  SITE (157): Xaa equals any of the naturally occurring L-amino acids
  SITE (170): Xaa equals any of the naturally occurring L-amino acids
  SITE (171): Xaa equals any of the naturally occurring L-amino acids
  SITE (177): Xaa equals any of the naturally occurring L-amino acids
MAAPRGRAAPWTTALLLLLASQVLSPGSCADEEEVPEEWVLLHVVQGQIGAGNYSYLRLNHEGKIVLRMRSLKGDADLYVSASSLHPSFDDYELQSATCGPDAVSIPAHFRRPVGIGVYGHPSHLESEFEMKVYYDGTVEQHPFGEAAYPADGQMPXRSTLVPRKTPRKXXNLFSGXY

SEQ ID NO: 787 - protein, 191 aa, Homo sapiens
MAAPRGRAAPWTTALLLLLASQVLSPGSCADEEEVPEEWVLLHVVQGQIGAGNYSYLRLNHEGKIVLRMRSLKGDADLYVSASSLHPSFDDYELQSATCGPDAVSIPAHFRRPVGIGVYGHPSHLESEFEMKVYYDGTVEQHPFGEAAYPADGADAGQKHAGAPEDASQEEESVLWTILISILKLELEILF

SEQ ID NO: 788 - protein, 8 aa, Homo sapiens
TAIFFLLV

SEQ ID NO: 789 - protein, 56 aa, Homo sapiens
  SITE (9): Xaa equals any of the naturally occurring L-amino acids
  SITE (24): Xaa equals any of the naturally occurring L-amino acids
  SITE (30): Xaa equals any of the naturally occurring L-amino acids
MRFWFLVFXFFFFPEAHVYPTSWXVSEQGXATISVTPGILNWIFVEEENNTVLDFP

SEQ ID NO: 790 - protein, 279 aa, Homo sapiens
EERWKSPEVRWAPGVAMEESGYESVLCVKPDVHVYRIPPRATNRGYRAAEWQLDQPSWSGRLRITAKGQMAYIKLEDRTSGELFAQAPVDQFPGTAVESVTDSSRYFVIRIEDGNGRRAFIGIGFGDRGDAFDFNVALQDHFKWVKQQCEFAKQAQNPDQGPKLDLGFKEGQTIKLNIANMKKKEGAAGNPRVRPASTGGLSLLPPPPGGKTSTLIPPPGEQLAVGGSLVQPAVAPSSGGAPVPWPQPNPATADIWGDFTKSTGSTSSQTQPGTGWVQF

SEQ ID NO: 791 - protein, 106 aa, Homo sapiens
RSRSKPRCNCEIVTIFFARFKIGPGRHRKRKIPKLCSSGSTIGRVYSLPGLLRRGSCLFGYITPDWFVLKINVIMLVSYLMVSLEHSPLILFERVGGRDCEGREKC

SEQ ID NO: 792 - protein, 56 aa, Homo sapiens [sequence omitted]

SEQ ID NO: 793 - protein, 41 aa, Homo sapiens
MTFSPLMCYCCCWVGWAFCLFVWWQSVVVGSGRAYIGFSSY

SEQ ID NO: 794 - protein, 41 aa, Homo sapiens; identical to SEQ ID NO: 793

SEQ ID NO: 795 - protein, 41 aa, Homo sapiens; identical to SEQ ID NO: 793

SEQ ID NO: 796 - protein, 43 aa, Homo sapiens
FLRFDGIIMEALYKLNEIGKGELTLSIMHSGLKIRFQNEMSDL

SEQ ID NO: 797 - protein, 12 aa, Homo sapiens
IGVNYLLLFFIF

SEQ ID NO: 798 - protein, 19 aa, Homo sapiens
KLGFSTILLLSIFIMSEAN

SEQ ID NO: 799 - protein, 19 aa, Homo sapiens
KLGFSTILLLSIFIMSEAN

SEQ ID NO: 800 - protein, 23 aa, Homo sapiens
LCVCTGCPGGGPQIPFRWQTERG

SEQ ID NO: 801 - protein, 29 aa, Homo sapiens
VCVCVCLIARVYFCIYVCVWLHGCASVCL

SEQ ID NO: 802 - protein, 6 aa, Homo sapiens
VLPSAS

SEQ ID NO: 803 - protein, 35 aa, Homo sapiens
  SITE (10): Xaa equals any of the naturally occurring L-amino acids
  SITE (27): Xaa equals any of the naturally occurring L-amino acids
MRASGVYVSXCSFVFMCVCVCMLNSRXTFDYGVCG

SEQ ID NO: 804 - protein, 56 aa, Homo sapiens
MRASGVYVSECSFVFMCVCVCMSDCTGVLLYLCVCVVARVCLCVSLTLAGCVCKSV

SEQ ID NO: 805 - protein, 60 aa, Homo sapiens
MIRIQFLHLFLWVGFIFRQPPSSYPQDGRDSPWSFPCRDRSPGNNTSIPSHETVLNFILT

SEQ ID NO: 806 - protein, 60 aa, Homo sapiens; identical to SEQ ID NO: 805

SEQ ID NO: 807 - protein, 444 aa, Homo sapiens
  SITE (92): Xaa equals any of the naturally occurring L-amino acids
  SITE (95): Xaa equals any of the naturally occurring L-amino acids
  SITE (97): Xaa equals any of the naturally occurring L-amino acids
  SITE (98): Xaa equals any of the naturally occurring L-amino acids
  SITE (101): Xaa equals any of the naturally occurring L-amino acids
MLQRIGLIFLHNIVVVSNCFYFQAFLDEFTNWSRINPNKARIPMAGDTQGVVGTVSKPCFTAYEMKIGAITFQVATGDIATEQVDVIVNSTXRTXNXXSGXSRAILEGAGQAVESECAVLAAQPHRDFIITPGGCLKCKIIIHVPGGKDVRKTVTSVLEECEQRKYTSVSLPAIGTGNAGKNPITVADNIIDAIVDFSSQHSTPSLKTVKVVIFQPELLNIFYDSMKKRDLSASLNFQSTFSMTTCNLPEHWTDMNHQLFCMVQLEPGQSEYNTIKDKFTRTCSSYAIEKIERIQNAFLWQSYQVKKRQMDIKNDHKNNERLLFHGTDADSVPYVNQHGFNRSCAGKNAVSYGKGTYFAVDASYSAKDTYSKPDSNGRKHMYVVRVLTGVFTKGRAGLVTPPPKNPHNPTDLFDSVTNNTRSPKLFVVFFDNQAYPEYLITFTA

SEQ ID NO: 808 - protein, 505 aa, Homo sapiens
  SITE (358): Xaa equals any of the naturally occurring L-amino acids
  SITE (494): Xaa equals any of the naturally occurring L-amino acids
  SITE (504): Xaa equals any of the naturally occurring L-amino acids
  SITE (505): Xaa equals any of the naturally occurring L-amino acids
MFRTAVMMAASLALTGAVVAHAYYLKHQFYPTVVYLTKSSPSMAVLYIQAFVLVFLLGKVMGKVFFGQLRAAEMEHLLERSWYAVTETCLAFTVFRDDFSPRFVALFTLLLFLKCFHWLAEDRVDFMERSPNISWLFHCRIVSLMFLLGILDFLFVSHAYHSILTRGASVQLVFGFEYAILMTMVLTIFIKYVLHSVDLQSENPWDNKAVYMLYTELFTGFIKVLLYMAFMTIMIKVHTFPLFAIRPMYLAMRQFKKAVTDAIMSRRAIRNMNTLYPDATPEELQAMDNVCIICREEMVTGAKRLPCNHIFHTSCLRSWFQRQQTCPTCRMDVLRASLPAQSPPPPEPADQGPPPAPXPPPLLPQPPNFPQGLLPPFPPGMFPLWPPMGPFPPVPPPPSSGEAVAPPSTSAAALSRPSGAATTTAAGTSATAASATASGPGSGSAPEAGPAPGFPFPPPWMGMPLPPPFAFPPMPVPPAGFAGLTPEEYELWRXMSGRTGGPVXX

SEQ ID NO: 809 - protein, 191 aa, Homo sapiens
  SITE (18): Xaa equals any of the naturally occurring L-amino acids
  SITE (21): Xaa equals any of the naturally occurring L-amino acids
MFRTAVMMAASIWPRLWXCPXGWPCPWFPLPSSLDGYAPASTLCLPPNACAPCGFAGLTPEELRALEGHERQHLEARLQSLRNIHTLLDAAMLQINQYLTVLASLGPPRPATSVNSTEETATTVVAAASSTSIPSSEATTPTPGASPPAPEMERPPAPESVGTEEMPEDGEPDAAELRRRRLQKLESPVAH

SEQ ID NO: 810 - protein, 617 aa, Homo sapiens
MFRTAVMMAASLALTGAVVAHAYYLKHQFYPTVVYLTKSSPSMAVLYIQAFVLVFLLGKVMGKVFFGQLRAAEMEHLLERSWYAVTETCLAFTVFRDDFSPRFVALFTLLLFLKCFHWLAEDRVDFMERSPNISWLFHCRIVSLMFLLGILDFLFVSHAYHSILTRGASVQLVFGFEYAILMTMVLTIFIKYVLHSVDLQSENPWDNKAVYMLYTELFTGFIKVLLYMAFMTIMIKVHTFPLFAIRPMYLAMRQFKKAVTDAIMSRRAIRNMNTLYPDATPEELQAMDNVCIICREEMVTGAKRLPCNHIFHTSCLRSWFQRQQTCPTCRMDVLRASLPAQSPPPPEPADQGPPPAPHPPPLLPQPPNFPQGLLPPFPPGMFPLWPPMGPFPPVPPPPSSGEAVAPPSTSAAALSRPSGAATTTAAGTSATAASATASGPGSGSAPEAGPAPGFPFPPPWMGMPLPPPFAFPPMPVPPAGFAGLTPEELRALEGHERQHLEARLQSLRNIHTLLDAAMLQINQYLTVLASLGPPRPATSVNSTEETATTVVAAASSTSIPSSEATTPTPGASPPAPEMERPPAPESVGTEEMPEDGEPDAAELRRRRLQKLESPVAH

SEQ ID NO: 811 - protein, 20 aa, Homo sapiens
MNVRLVLNPFPLYSVYVIPN

SEQ ID NO: 812 - protein, 11 aa, Homo sapiens
LEILVVKKLLA

SEQ ID NO: 813 - protein, 20 aa, Homo sapiens
MNVRLVLNPFPLYSVYVIPN

SEQ ID NO: 814 - protein, 62 aa, Homo sapiens
MLCPALGPFLLFLLSSTLMASFMGDTPCHPGELSAFGVAPSRVFTSSFLFTVFTPSYPSLPG

SEQ ID NO: 815 - protein, 62 aa, Homo sapiens; identical to SEQ ID NO: 814

SEQ ID NO: 816 - protein, 51 aa, Homo sapiens
QASWVWWLTTVIPALWEARAGGSLEPRSSRLAWATQKVFISKKKKKKKRAA

SEQ ID NO: 817 - protein, 19 aa, Homo sapiens [sequence omitted]

SEQ ID NO: 818 - protein, 4 aa, Homo sapiens
FLSS

SEQ ID NO: 819 - protein, 53 aa, Homo sapiens
MFISLFIFGLVRLWPCCVVIYFVYSICKHQCSQEAHSSIFNCKFVSQSQFSIM

SEQ ID NO: 820 - protein, 53 aa, Homo sapiens; identical to SEQ ID NO: 819

SEQ ID NO: 821 - protein, 283 aa, Homo sapiens
MIFLLLMLSLELQLHQIAALFTVTVPKELYIIEHGSNVTLECNFDTGSHVNLGAITASLQKVENDTSPHRERATLLEEQLPLGKASFHIPQVQVRDEGQYQCIIIYGVAWDYKYLTLKVKASYRKINTHILKVPETDEVELTCQATGYPLAEVSWPNVSVPANTSHSRTPEGLYQVTSVLRLKPPPGRNFSCVFWNTHVRELTLASIDLQSQMEPRTHPTWLLHIFIPSCIIAFIFIATVIALRKQLCQKLYSSKDTTKRPVTTTKREVNSAVNLNLWSWEPG

SEQ ID NO: 822 - protein, 93 aa, Homo sapiens
  SITE (89): Xaa equals any of the naturally occurring L-amino acids
  SITE (92): Xaa equals any of the naturally occurring L-amino acids
MIFLLLMLSLELQLHQIAALFTVTVPKELYIIEHGSNVTLECNFDTGSHVNLGAITASLQKVENDTSPHRERATLLEEQLPLGKASFPXLKXK

SEQ ID NO: 823 - protein, 23 aa, Homo sapiens
LFLLLEISTHLCFWKSLRKLEGK

SEQ ID NO: 824 - protein, 46 aa, Homo sapiens
MPWLKSLLHFSLFLVVFSTLAVKSLGVPVAAGSPFCIVDVLHFILL

SEQ ID NO: 825 - protein, 46 aa, Homo sapiens; identical to SEQ ID NO: 824

SEQ ID NO: 826 - protein, 67 aa, Homo sapiens [sequence omitted]

SEQ ID NO: 827 - protein, 83 aa, Homo sapiens
GHVLAYSSWPSLAPGLSVQYFVSRVEVPNPGCTLEAPGKLSEFLRPEPHPKPISSESLGGTEPGFCQLKPAMVTSVSSYTENS

SEQ ID NO: 828 - protein, 67 aa, Homo sapiens [sequence omitted]

SEQ ID NO: 829 - protein, 83 aa, Homo sapiens; identical to SEQ ID NO: 827

SEQ ID NO: 830 - protein, 66 aa, Homo sapiens
  SITE (9): Xaa equals any of the naturally occurring L-amino acids
SWVDFDCVXEVSYLNSGSYSLVLHLEGLHPLELSGKLAIDFGKKREFCVDGVGGATLVICPGFQDF

SEQ ID NO: 831 - protein, 61 aa, Homo sapiens
  SITE (13): Xaa equals any of the naturally occurring L-amino acids
MWYVCACVCVCVXVCSYNRRTGKVRTQNNEDLLKCGGGVCVCVFIEQEDRKGNDHPWKMKG

SEQ ID NO: 832 - protein, 11 aa, Homo sapiens
VCCCLHLNAFV

SEQ ID NO: 833 - protein, 716 aa, Homo sapiens
MNNFRATILFWAAAAWAKSGKPSGEMDEVGVQKCKNALKLPVLEVLPGGGWDNLRNVDMGRVMELTYSNCRTTEDGQYIIPDEIFTIPQKQSNLEMNSEILESWANYQSSTSYSINTELSLFSKVNGKFSTEFQRMKTLQVKDQAITTRVQVRNLVYTVKINPTLELSSGFRKELLDISDRLENNQTRMATYLAELLVLNYGTHVTTSVDAGAALIQEDHLRASFLQDSQSSRSAVTASAGLAFQNTVNFKFEENYTSQNVLTKSYLSNRTNSRVQSIGGVPFYPGITLQAWQQGITNHLVAIDRSGLPLHFFINPNMLPDLPGPLVKKVSKTVETAVKRYYTFNTYPGCTDLNSPNFNFQANTDDGSCEGKMTNFSFGGVYQECTQLSGNRDVLLCQKLEQKNPLTGDFSCPSGYSPVHLLSQIHEEGYNHLECHRKCTLLVFCKTVCEDVFQVAKAEFRAFWCVASSQVPENSGLLFGGLFSSKSINPMTNAQSCPAGYFPLRLFENLKVCVSQDYELGSRFAVPFGGFFSCTVGNPLVDPAISRDLGAPSLKKCPGGFSQHPALISDGCQVSYCVKSGLFTGGSLPPARLPPFTRPPLMSQAATNTVIVTNSENARSWIKDSQTHQWRLGEPIELRRAMNVIHGDGGGLSGGAAAGVTVGVTTILAVVITLAIYGTRKFKKKAYQAIEERQSLVPGTAATGDTTYQEQGQSPA

SEQ ID NO: 834 - protein, 94 aa, Homo sapiens
LAVIMARPAAEPLCFLNPKLLALAVGVLELLGRGFLDSSPLLRPASDGERFTWEALGESLPFSDTFASSVFPVPGVFSAPAGAEAFVLGMVMPT

SEQ ID NO: 835 - protein, 39 aa, Homo sapiens
MHLLPWRAAAAPPLLIAVPPRPSRSPVQPPSLGAANPSA

SEQ ID NO: 836 - protein, 9 aa, Homo sapiens
PSAAASATP

SEQ ID NO: 837 - protein, 63 aa, Homo sapiens
  SITE (12): Xaa equals any of the naturally occurring L-amino acids
  SITE (16): Xaa equals any of the naturally occurring L-amino acids
  SITE (20): Xaa equals any of the naturally occurring L-amino acids
  SITE (23): Xaa equals any of the naturally occurring L-amino acids
  SITE (25): Xaa equals any of the naturally occurring L-amino acids
  SITE (35): Xaa equals any of the naturally occurring L-amino acids
  SITE (38): Xaa equals any of the naturally occurring L-amino acids
  SITE (48): Xaa equals any of the naturally occurring L-amino acids
  SITE (49): Xaa equals any of the naturally occurring L-amino acids
MHLLPWRAAAAXPLLXAVPXRAXRXPVQAPSLGAXNPXRGTQVATVSXXSGKLLGLKAPRPKP

SEQ ID NO: 838 - protein, 84 aa, Homo sapiens
TYSFCVCERAFVFGSVPRAEVEQGCTYHGKGGRKENWIACDLWWNLFLLPRPFRPCLISVGHFRLWQGRAGLQSEVPASSLEHN

SEQ ID NO: 839 - protein, 77 aa, Homo sapiens
  SITE (8): Xaa equals any of the naturally occurring L-amino acids
  SITE (9): Xaa equals any of the naturally occurring L-amino acids
  SITE (10): Xaa equals any of the naturally occurring L-amino acids
  SITE (16): Xaa equals any of the naturally occurring L-amino acids
LGGYALSXXXNRVTDXVMIYFFIIIVEYFYGKIFVVLIIPIKIMPNTKYEFYDVHFVLGIKRKKHTSWKSVSCFLLL

SEQ ID NO: 840 - protein, 184 aa, Homo sapiens
MSRTAYTVGALLLLLGTLLPAAEGKKKGSQGAIPPPDKAQHNDSEQTQSPQQPGSRNRGRGQGRGTAMPGEEVLESSQEALHVTERKYLKRDWCKTQPLKQTIHEEGCNSRTIINRFCYGQCNSFYIPRHIRKEEGSFQSCSFCKPKKFTTMMVTLNCPELQPPTKKKRVTRVKQCRCISIDLD

SEQ ID NO: 841 - protein, 87 aa, Homo sapiens
  SITE (1): Xaa equals any of the naturally occurring L-amino acids
  SITE (26): Xaa equals any of the naturally occurring L-amino acids
XHSHWEGLKLCCLNPVLGPARKRKRXLRNRGARGGCRCHSRAALHPHPHASCFTAHSVTELVALGTGGHPHTLMPTAEGRATHPSRD

SEQ ID NO: 842 - protein, 77 aa, Homo sapiens
FVLLHCLNSHLHLALQFPLNTLSSPLVCCQSAALPIKACINYICPMFTFIKHFPCTPVPTSQQTRERAVQLMSLPSF

SEQ ID NO: 843 - protein, 41 aa, Homo sapiens
MAFPRVGAFLFLASLSSLLHCRLLAEAVSGRSVSLAPSIIR

SEQ ID NO: 844 - protein, 164 aa, Homo sapiens
  SITE (3): Xaa equals any of the naturally occurring L-amino acids
  SITE (95): Xaa equals any of the naturally occurring L-amino acids
RMXCSQPPRCHFQSDFQKCAPCPRAQTHWLEPPGRVQTISSMRNAQKGFADSIRLWRLPASGVGWVVSPPIQTQEVAPEGMYLVGSSSGTLGGCXALTQYFSLSPLWGACVRARVLAYAFLCGHIRMPLGEHVHVSPPERACVCAPLRPRFGRLGFGVPVFCPP

SEQ ID NO: 845 - protein, 80 aa, Homo sapiens
  SITE (25): Xaa equals any of the naturally occurring L-amino acids
MGTSTAWRVPWRRWARVRCWWLWPXTGTAEPPGTAGWQGLAGGRCREAWGSLLMGMFGLCFLPVHSQSCLSSSSSPTPRP

SEQ ID NO: 846 - protein, 53 aa, Homo sapiens
  SITE (4): Xaa equals any of the naturally occurring L-amino acids
  SITE (10): Xaa equals any of the naturally occurring L-amino acids
  SITE (27): Xaa equals any of the naturally occurring L-amino acids
IGPXGPRNSXTGGAFLDFSAQAKKKKXQFLKIFFPGLCKSLIYGIFVMQRNTL

SEQ ID NO: 847 - protein, 50 aa, Homo sapiens [sequence omitted]

SEQ ID NO: 848 - protein, 86 aa, Homo sapiens
  SITE (3): Xaa equals any of the naturally occurring L-amino acids
  SITE (5): Xaa equals any of the naturally occurring L-amino acids
  SITE (6): Xaa equals any of the naturally occurring L-amino acids
KKXPXXLSGSKAIASKTKEIEQVYRQDCETFGMVVKMLIEKDPSLEKSIQFALRQNLHEIGERCVEELKHFIAEYDTSTQDFGEPF

SEQ ID NO: 849 - protein, 129 aa, Homo sapiens
RKVEGGASGLNGFPNHPSSLGPAWFPPLPLPSTLSRTGLMKALPKISPTPNFPLPPTFPTSSTTLFGATAGPEAQSAVSQAFVHLSPQSISVLGESHTETQEHPLPELREVLSLRGGLSAVCNNVVLFI

SEQ ID NO: 850 - protein, 48 aa, Homo sapiens
  SITE (45): Xaa equals any of the naturally occurring L-amino acids
  SITE (46): Xaa equals any of the naturally occurring L-amino acids
  SITE (48): Xaa equals any of the naturally occurring L-amino acids
MVQRLWVSRLLRHRKAQLLLVNLLTFGLEVCLAAGFTYVPLCCGXXVX

SEQ ID NO: 851 - protein, 12 aa, Homo sapiens
ILQRRKQRLLRG

SEQ ID NO: 852 - protein, 371 aa, Homo sapiens
  SITE (20): Xaa equals any of the naturally occurring L-amino acids
MLFPSFSRSLVPLPHALYLXQPLTHTTSLLAGIGPVLGLVCVPLLGSASDHWRGRYGRRRPFIWALSLGILLSLFLIPRAGWLAGLLCPDPRPLELALLILGVGLLDFCGQVCFTPLEALLSDLFRDPDHCRQAYSVYAFMISLGGCLGYLLPAIDWDTSALAPYLGTQEECLFGLLTLIFLTCVAATLLVAEEAALGPTEPAEGLSAPSLSPHCCPCRARLAFRNLGALLPRLHQLCCRMPRTLRRLFVAELCSWMALMTFTLFYTDFVGEGLYQGVPRAEPGTEARRHYDEGKALAASRGWCGSRPPETTLGAVSGLVPLHPGPDFSVRKVGMDPICIHGFSWVWNISACGFRKASGCSRSLIRVVAPV

SEQ ID NO: 853 - protein, 75 aa, Homo sapiens
MGPLWGAPLRAWAAGSVGCPCCLSCASPSSISSAGDPLASCSTCGSTWEIPLTWMTMDHLLVRYYLSQARWCTTG

SEQ ID NO: 854 - protein, 57 aa, Homo sapiens
ISYHHVKASHLKIKIQISLKPEVLVPLHCLPLSPTPREESGGFLFSIAIAAVGFLVQ

SEQ ID NO: 855 - protein, 10 aa, Homo sapiens
WASMSSVFGL

SEQ ID NO: 856 - protein, 5 aa, Homo sapiens
SFATC

SEQ ID NO: 857 - protein, 73 aa, Homo sapiens
MWLPAWAAIETFSTCSSLSLSFQPRWALASEGCAGSYVTTHRALGAHLWPLWSDQFLGKGLGLRIPFITHAHQ

SEQ ID NO: 858 - protein, 36 aa, Homo sapiens
  SITE (17): Xaa equals any of the naturally occurring L-amino acids
MAGEEMAWGARLWIMCXLLFLAASEGIMPRLRASAW

SEQ ID NO: 859 - protein, 352 aa, Homo sapiens
VSLLLWGISIRGADACADAHLFCKECLIRYAQEAVFGSGKLELSCMEGSCTCSFPTSELEKVLPQTILYKYYERKAEEEVAAAYADELVRCPSCSFPALLDSDVKRFSCPNPHCRKETCRKCQGLWKEHNGLTCEELAEKDDIKYRTSIEEKMTAARIRKCHKCGTGLIKSEGCNRMSCRCGAQMCYLCRVSINGYDHFCQHPRSPGAPCQECSRCSLWTDPTEDDEKLIEEIQKEAEEEQKRKNGENTFKRIGPPLEKPVEKVQRVEALPRPVPQNLPQPQMPPYAFAHPPFPLPPVRPVFNNFPLNMGPIPAPYVPPLPNVRVNYDFGPIHMPLEHNLPMHFGPQPRHRF

SEQ ID NO: 860 - protein, 63 aa, Homo sapiens
MITFLPIIFSILVVVTFVIGNFANGFIALVNSTEWVKRQKISFADQIVTALAVSRVGLLWVLL

SEQ ID NO: 861 - protein, 8 aa, Homo sapiens
LTMLFNVI

SEQ ID NO: 862 - protein, 7 aa, Homo sapiens
TYIHFLD

SEQ ID NO: 863 - protein, 53 aa, Homo sapiens
  SITE (35): Xaa equals any of the naturally occurring L-amino acids
TEEFKYAVSCNCGTAAWVRVRERERKREKKKKKRXAALEDPSRGPSLRVHATS

SEQ ID NO: 864 - protein, 22 aa, Homo sapiens
LVLFITLLPGKLAHSWHTVNVQ

SEQ ID NO: 865 - protein, 2 aa, Homo sapiens
GC

SEQ ID NO: 866 - protein, 40 aa, Homo sapiens
MILYICLLLKIWGCSLPCNFSFPLDLRKVMDFQFVQHFFL

SEQ ID NO: 867 - protein, 7 aa, Homo sapiens
SFCMGTM

SEQ ID NO: 868 - protein, 86 aa, Homo sapiens
  SITE (2): Xaa equals any of the naturally occurring L-amino acids
  SITE (25): Xaa equals any of the naturally occurring L-amino acids
SXIVGLAIWRGGLCQELPLERFLLXTVFGSDLSLLSGGDLCLELLGGLCLEVCLRGDICLGPLRVSVSELSLLCLSVQGQQKVCPF

SEQ ID NO: 869 - protein, 33 aa, Homo sapiens
KILVSYLMPGMMRIENFSIFMCLTGCLGINFAF

SEQ ID NO: 870 - protein, 288 aa, Homo sapiens
  SITE (87): Xaa equals any of the naturally occurring L-amino acids
  SITE (99): Xaa equals any of the naturally occurring L-amino acids
  SITE (230): Xaa equals any of the naturally occurring L-amino acids
  SITE (263): Xaa equals any of the naturally occurring L-amino acids
  SITE (264): Xaa equals any of the naturally occurring L-amino acids
  SITE (270): Xaa equals any of the naturally occurring L-amino acids
  SITE (275): Xaa equals any of the naturally occurring L-amino acids
MARISFSYLCPASWYFTVPTVSPFLRQRVAFLGLFFISCLLLLMLIIDFRHWSASLPRDRQYERYLARVGELEATDTEDPNLNYGLXVDCGSSGSRIFXYFWPRHNGNPHDLLDIKQMRDRNSQPVVKKIKPGISAMADTPEHASDYLRPLLSFAAAHVPVKKHKETPLYILCTAGMRLLPERKQLAILADLVKDLPLEFDFLFSQSQAEVISGKQEGVYAWIGINFVLXRFDHEDESDAEATQELAAGRRRTVGILDMGGAXXQIAYEXPTFPXKKTPPLFPLLGGI

SEQ ID NO: 871 - protein, 107 aa, Homo sapiens
  SITE (66): Xaa equals any of the naturally occurring L-amino acids
PLGREPLAGFLSFLSFSLLWCLEAFPRLQFLTTLTDFAIVLSPPLSFPKLTLWRLIKRKNHRPGAXLTPRRRANHLRCGVRDQPDQNRETPSLLNNTKLAGRGGARL

SEQ ID NO: 872 - protein, 64 aa, Homo sapiens
  SITE (7): Xaa equals any of the naturally occurring L-amino acids
  SITE (27): Xaa equals any of the naturally occurring L-amino acids
SWVIVVXIWGYLLEGHGVPFCKSYGPXPWKLHTHHAAYNSGSSQVYRILGNSPCPVLIHCSFSG

SEQ ID NO: 873 - protein, 14 aa, Homo sapiens
  SITE (9): Xaa equals any of the naturally occurring L-amino acids
  SITE (14): Xaa equals any of the naturally occurring L-amino acids
WKGLLEGSXEATMX

SEQ ID NO: 874 - protein, 66 aa, Homo sapiens
MSWVIVVIIWGYLLEGHGVPFCKSYGPSPWKLHTHHAAYNSGSSQVYRILETLMSGSTHCSFSGTF

SEQ ID NO: 875 - protein, 90 aa, Homo sapiens
  SITE (31): Xaa equals any of the naturally occurring L-amino acids
  SITE (57): Xaa equals any of the naturally occurring L-amino acids
MPRAPWRIPLCALPTLCLGSPLPSQPTHPIXYDHRAPTWKMAHPGGPRSSHSPRTWXTPSSQTKAALPAGGARNSPLQLCTRSRFCGTPM

SEQ ID NO: 876 - protein, 127 aa, Homo sapiens
MPRAPWRIPLCALPTLCLGSPLPSQPTHPIFYDHRAPTWKMAHPGGPRSSHSPRGPGGHPALRQRLPCRRGEPETALCSSAPGAGFAEPPCKASPGWGPPSRGPQGDRSQGEWLPALGTPCGGPDDS

SEQ ID NO: 877 - protein, 66 aa, Homo sapiens
  SITE (43): Xaa equals any of the naturally occurring L-amino acids
MAGQFRSYVWDPLLILSQIVLMQTVYYGSLGLWLALVDGLVRXAPRWTRCSTPRSWAFPPLQAGSP

SEQ ID NO: 878 - protein, 124 aa, Homo sapiens
  SITE (28): Xaa equals any of the naturally occurring L-amino acids
TQIPTHISRYTPLHSSLGNRARLRLKKXKIKYAYLCPPSLKQLLNYAVINGLSSANYFCLYTKVPQAMLLLASGLSSAFPYDSLGFTLSMLLFFERNKSRVEVLAKEPSAPSSYWDSENRGCQL

SEQ ID NO: 879 - protein, 39 aa, Homo sapiens
MAGQFRSYVWDPLLILSQSSSCRPCITARWACGWRWWTG

SEQ ID NO: 880 - protein, 67 aa, Homo sapiens
MSLCRILGYSFSSRLSSLILPLAVFHYCLSCPLHFKLSFKYLPFPSFPFSSLPCPALPCPALPSPPL

SEQ ID NO: 881 - protein, 86 aa, Homo sapiens
MSLCRILGYSFSSRLSSLILPLAVFHYCLSCPLHFKLSFKYLPFPSFPFSSLPCPALPCPALPSPPLPCPPLPSPPLPLPSLSFFR

SEQ ID NO: 882 - protein, 55 aa, Homo sapiens
MCVGLFLSSVFFHICVHPFANATLSCLLEIGKLCESFNFVLFQIVLAILVPLTFI

SEQ ID NO: 883 - protein, 73 aa, Homo sapiens
TLFVSYQLSNPQYSSFISQNRKLKQREEKLHERFYTAVRSLNWILNLAFWLESPSFYQLCIAVRVDSPWKGKS

SEQ ID NO: 884 - protein, 48 aa, Homo sapiens
  SITE (15): Xaa equals any of the naturally occurring L-amino acids
  SITE (29): Xaa equals any of the naturally occurring L-amino acids
MKPPPLFFFLKIVLXIWGPLWFHMNFRFXFSISMKNAIGILIGIALNL

SEQ ID NO: 885 - protein, 48 aa, Homo sapiens
MKPPPLFFFLKIVLAIWGPLWFHMNFRFVFSISMKNAIGILIGIALNL

SEQ ID NO: 886 - protein, 214 aa, Homo sapiens
  SITE (199): Xaa equals any of the naturally occurring L-amino acids
  SITE (206): Xaa equals any of the naturally occurring L-amino acids
  SITE (214): Xaa equals any of the naturally occurring L-amino acids
MLGARAWLGRVLLLPRAGAGLAASRRCPGVWPRTWPHRSPSRGSSSRDKDRSATVSSSVPMPAGGKGSHPSSTPQRVPNRLIHEKSPYLLQHAYNPVDWYPWGQEAFDKARKENKPIFLSVGYSTCHWCHMMEEESFQNEEIGRLLSEDFVSVKVDREERPDVDKVYMTFVQATSSGGGWPMNVWLTPNLQPFVGGTIXLLKDGLXRVGSAQCX

SEQ ID NO: 887 - protein, 43 aa, Homo sapiens
MLGARAWLGRVLLLPRAGAGLAASRRSACSPTSRLNSLRSLIP

SEQ ID NO: 888 - protein, 802 aa, Homo sapiens [sequence omitted]

SEQ ID NO: 889 - protein, 98 aa, Homo sapiens
MHCCQLPWRCAQAPQEAFLLCLLFLILVLVLLGCSRGLPGHTPWRLHPAAAALLAPLLHDALGACGFQGPEYLLPCLLPLPKPGQLQGPWGPLWALLP

SEQ ID NO: 890 - protein, 25 aa, Homo sapiens
  SITE (9): Xaa equals any of the naturally occurring L-amino acids
CAVRFREQXAPERVFLPTRGRKSEP

SEQ ID NO: 891 - protein, 22 aa, Homo sapiens
LPRPCAPSPVWRQVGREEASLL

SEQ ID NO: 892 - protein, 98 aa, Homo sapiens; identical to SEQ ID NO: 889

SEQ ID NO: 893 - protein, 99 aa, Homo sapiens [sequence omitted]

SEQ ID NO: 894 - protein, 89 aa, Homo sapiens
MKPATASALLLLLLGLAWTQGSHGWGADASSLQKRAGRADQVSLCPQVTLQGPWSPLALLPGLGNLKFSFTPPFNGFLSRVQDGRRWQL

SEQ ID NO: 895 - protein, 73 aa, Homo sapiens
MAGNIQAVETGYVLICLIVPLLLCGLREGQEVPFDVNKAKYLPTFLKKKKKKKKKKKKKKKKKKKKKKKKKKI

SEQ ID NO: 896 - protein, 72 aa, Homo sapiens
MAGNIQAVETGYVLICLIVPLLLCGLREGQEVPFDVNKAKYLPTFLKKKKKKKKKKKKKKKKKKKKKKKKKK

SEQ ID NO: 897 - protein, 29 aa, Homo sapiens
  SITE (26): Xaa equals any of the naturally occurring L-amino acids
  SITE (29): Xaa equals any of the naturally occurring L-amino acids
MYVWVSGALVLVLSPHPASRTLCLMXQAX

SEQ ID NO: 898 - protein, 80 aa, Homo sapiens
PHCASRAVPYPPGPAAAAFPRQGLQLATTCGHSSDPACFGQCPCHLCANHPGYLWSYRVHLSPQPHLHPPQHLLPPHCTL

SEQ ID NO: 899 - protein, 29 aa, Homo sapiens
MYVWVSGALVLVLSPHPASRTLCLMAQAV

SEQ ID NO: 900 - protein, 53 aa, Homo sapiens [sequence omitted]

SEQ ID NO: 901 - protein, 46 aa, Homo sapiens
MRIPVFPKQLMFTGLVFLLLLSKDEGIHNRLSLENTNDGQLFGVIK

SEQ ID NO: 902 - protein, 19 aa, Homo sapiens
  SITE (7): Xaa equals any of the naturally occurring L-amino acids
  SITE (11): Xaa equals any of the naturally occurring L-amino acids
MPFTLGXTRRXRGLAKKPK

SEQ ID NO: 903 - protein, 531 aa, Homo sapiens
MLCALLLLPSLLGATRASPTSGPQECAKGSTVWCQDLQTAARCGAVGYCQGAVWNKPTAKSLPCDVCQDIAAAAGNGLNPDATESDILALVMKTCEWLPSQESSAGCKWMVDAHSSAILSMLRGAPDSAPAQVCTALSLCEPLQRHLATLRPLSKEDTFEAVAPFMANGPLTFHPRQAPEGALCQDCVRQVSRLQEAVRSNLTLADLNIQEQCESLGPGLAVLCKNYLFQFFVPADQALRLLPPQELCRKGGFCEELGAPARLTQVVAMDGVPSLELGLPRKQSEMQMKAGVTCEVCMNVVQKLDHWLMSNSSELMITHALERVCSVMPASITKECIILVDTYSPSLVQLVAKITPEKVCKFIRLCGNRRRARAVHDAYAIVPSPEWDAENQGSFCNGCKRLLTVSSHNLESKSTKRDILVAFKGGCSILPLPYMIQCKHFVTQYEPVLIESLKDMMDPVAVCKKVGACHGPRTPLLGTDQCALGPSFWCRSQEAASCATLCNTARSMYGKRCTSTLGNTRDRGCQRPRAC

SEQ ID NO: 904 - protein, 498 aa, Homo sapiens
  SITE (11): Xaa equals any of the naturally occurring L-amino acids
  SITE (20): Xaa equals any of the naturally occurring L-amino acids
  SITE (398): Xaa equals any of the naturally occurring L-amino acids
EALGGRCLWEXPVTFTVHFXDNSGDVFHAHSSVLNFATNRDDFVQIGKGPTNNTCVVRTVSVGLTLLRVWDAEHPGLSDFMPLPVLQAISPELSGAMVVGDVLCLATVLTSLEGLSGTWSSSANSILHIDPKTGVAVARAVGSVTVYYEVAGHLRTYKEVVVSVPQRIMARHLHPIQTSFQEATASKVIVAVGDRSSNLRGECTPTQREVIQALHPETLISCQSQFKPAVFDFPSQDVFTVEPQFDTALGQYFCSITMHRLTDKQRKHLSMKKTALVVSASLSSSHFSTEQVGAEVPFSPGLFADQAEILLSNHYTSSEIRVFGAPEVLENLEVKSGSPAVLAFAKEKSFGWPSFITYTVGVLDPAAGSQGPLSTTLTFSSPVTNQAIAIPVTVAFVXDRRGPGPYGASLFQHFLDSYQVMFFTLFALLAGTAVMIIAYHTVCTPRDLAVPAALTPRASPGHSPHYFAASSPTSPNALPPARKASPPSGLWSPAYASH

SEQ ID NO: 905 - protein, 886 aa, Homo sapiens
  SITE (26): Xaa equals any of the naturally occurring L-amino acids
  SITE (216): Xaa equals any of the naturally occurring L-amino acids
  SITE (234): Xaa equals any of the naturally occurring L-amino acids
  SITE (275): Xaa equals any of the naturally occurring L-amino acids
  SITE (871): Xaa equals any of the naturally occurring L-amino acids
MAARGRGLLLLTLSVLLAAGPSAAAXKLNIPKVLLPFTRATRVNFTLEASEGCYRWLSTRPEVASIEPLGLDEQQCSQKAVVQARLTQPARLTSIIFAEDITTGQVLRCDAIVDLIHDIQIVSTTRELYLEDSPLELKIQALDSEGNTFSTLAGLVFEWTIVKDSEADRFSDSHNALRILTFLESTYIPPSYISEMEKAAKQGDTILVSGMKTGSXKLKARIQEAVYKNVRPAXVRLLILENILLNPAYDVYLMVGTSIHYKVQKIRQGKITELXMPSDQYELQLQNSIPGPEGDPTRPVAVLAQDTSMVTALQLGQSSLVLGHRSIRMQGASRLPNSTIYVVEPGYLGFTVHPGDRWVLETGRLYEITIEVFDKFSNKVYVSDNIRIETVLPAEFFEVLSSSQNGSYHRIRALKRGQTAIDAALTSVVDQDGGVHILQVPVWNQQEVEIHIPITLYPSILTFPWQPKTGAYQYTIRAHGGSGNFSWSSSSHLVATVTVKGVMTTGSDIGFSVIQAHDVQNPLHFGEMKVYVIEPHSMEFAPCQVEARVGQALELPLRISGLMPGGASEVVTLSDCSHFDLAVEVENQGVFQPLPGRLPPGSEHCSGVRVKAEAQGSTTLLVSYRHGHVHLSAKITIAAYLPLKAVDPSSVALVTLGSSKEMLFEGGPRPWILEPSKFFQNVTAEDTDSIGLALFAPHSSRNYQQHWILVTCQALGEQVIALSVGNKPSLTNPFPAVEPAVVKFVCAPPSRLTLVPVYTSPQLDMSCPLLQQNKQVVPVSSHRNPLLDLAAYDQEGRRFDNFSSLSIQWESTRPVLASIEPELPMQLVSQDDESGQKKLHGLQAILVHEASGTTASLPLPLATRSPTSALXEQSSRMTLWCLCRPP

SEQ ID NO: 906 - protein, 1887 aa, Homo sapiens
MAARGRGLLLLTLSVLLAAGPSAAAAKLNIPKVLLPFTRATRVNFTLEASEGCYRWLSTRPEVASIEPLGLDEQQCSQKAVVQARLTQPARLTSIIFAEDITTGQVLRCDAIVDLIHDIQIVSTTRELYLEDSPLELKIQALDSEGNTFSTLAGLVFEWTIVKDSEADRFSDSHNALRILTFLESTYIPPSYISEMEKAAKQGDTILVSGMKTGSSKLKARIQEAVYKNVRPAEVRLLILENILLNPAYDVYLMVGTSIHYKVQKIRQGKITELSMPSDQYELQLQNSIPGPEGDPTRPVAVLAQDTSMVTALQLGQSSLVLGHRSIRMQGASRLPNSTIYVVEPGYLGFTVHPGDRWVLETGRLYEITIEVFDKFSNKVYVSDNIRIETVLPAEFFEVLSSSQNGSYHRIRALKRGQTAIDAALTSVVDQDGGVHILQVPVWNQQEVEIHIPITLYPSILTFPWQPKTGAYQYTIRAHGGSGNFSWSSSSHLVATVTVKGVMTTGSDIGFSVIQAHDVQNPLHFGEMKVYVIEPHSMEFAPCQVEARVGQALELPLRISGLMPGGASEVVTLSDCSHFDLAVEVENQGVFQPLPGRLPPGSEHCSGVRVKAEAQGSTTLLVSYRHGHVHLSAKITIAAYLPLKAVDPSSVALVTLGSSKEMLFEGGPRPWILEPSKFFQNVTAEDTDSIGLALFAPHSSRNYQQHWILVTCQALGEQVIALSVGNKPSLTNPFPAVEPAVVKFVCAPPSRLTLVPVYTSPQLDMSCPLLQQNKQVVPVSSHRNPLLDLAAYDQEGRRFDNFSSLSIQWESTRPVLASIEPELPMQLVSQDDESGQKKLHGLQAILVHEASGTTAITATATGYQESHLSSARTKQPHDPLVPLSASIELILVEDVRVSPEEVTIYNHPGIQAELRIREGSGYFFLNTSTADVVKVAYQEARGVAMVHPLLPGSSTIMIHDLCLVFPAPAKAVVYVSDIQELYIRVVDKVEIGKTVKAYVRVLDLHKKPFLAKYFPFMDLKLRAASPIITLVALDEALDNYTITFLIRGVAIGQTSLTASVTNKAGQRINSAPQQIEVFPPFRLMPRKVTLLIGATMQVTSEGGPQPQSNILFSISNESVALVSAAGLVQGLAIGNGTVSGLVQAVDAETGKVVIISQDLVQVEVLLLRAVRIRAPIMRMRTGTQMPIYVTGITNHQNPFSFGNAVPGLTFHWSVTKRDVLDLRGRHHEASIRLPSQYNFAMNVLGRVKGRTGLRVVVKAVDPTSGQLYGLARELSDEIQVQVFEKLQLLNPEIEAEQILMSPNSYIKLQTNRDGAASLSYRVLDGPEKVPVVHVDEKGFLASGSMIGTSTIGVIAQEPFGANQTIIVAVKVSPVSYLRVSMSPVLHTQNKEALVAVPLGMTVTFTVHFHDNSGDVFHAHSSVLNFATNRDDFVQIGKGPTNNTCVVRTVSVGLTLLRVWDAEHPGLSDFMPLPVLQAISPELSGAMVVGDVLCLATVLTSLEGLSGTWSSSANSILHIDPKTGVAVARAVGSVTVYYEVAGHLRTYKEVVVSVPQRIMARHLHPIQTSFQEATASKVIVAVGDRSSNLRGECTPTQREVIQALHPETLISCQSQFKPAVFDFPSQDVFTVEPQFDTALGQYFCSITMHRLTDKQRKHLSMKKTALVVSASLSSSHFSTEQVGAEVPFSPGLFADQAEILLSNHYTSSEIRVFGAPEVLENLEVKSGSPAVLAFAKEKSFGWPSFITYTVGVLDPAAGSQGPLSTTLTFSSPVTNQAIAIPVTVAFVVDRRGPGPYGASLFQHFLDSYQVMFFTLFALLAGTAVMIIAYHTVCTPRDLAVPAALTPRASPGHSPHYFAASSPTSPNALPPARKASPPSGLWSPAYASH

SEQ ID NO: 907 - protein, 16 aa, Homo sapiens
PLCLALELGWVCLSST

SEQ ID NO: 908 - protein, 302 aa, Homo sapiens
  SITE (262): Xaa equals any of the naturally occurring L-amino acids
  SITE (279): Xaa equals any of the naturally occurring L-amino acids
  SITE (294): Xaa equals any of the naturally occurring L-amino acids
  SITE (295): Xaa equals any of the naturally occurring L-amino acids
MLLLWKNFMYRRRQPVQLLVELLWPLFLFFILVAVRHSHPPLEHHECHFPNKPLPSAGTVPWLQGLICNVNNTCFPQLTPGEEPGRLSNFNDSLVSRLLADARTVLGGASAHRTLAGLGKLIATLRAARSTAQPQPTKQSPLEPPMLDVAELLTSLLRTESLGLALGQAQEPLHSLLEAAEDLAQELLALRSLVELRALLQRPRGTSGPLELLSEALCSVRGPSSTVGPSLNWYEASDLMELVGQEPESACRQQLSPLLGAXWSLDSTRCPLVWNAEAXSSEVLLTDHFTEVMXXERLQSYL

SEQ ID NO: 909 - protein, 37 aa, Homo sapiens
LPWLPFFFSCLVSTLPSMSVSAFSLVVRGRRAFTSVR

SEQ ID NO: 910 - protein, 181 aa, Homo sapiens
  SITE (80): Xaa equals any of the naturally occurring L-amino acids
  SITE (151): Xaa equals any of the naturally occurring L-amino acids
  SITE (162): Xaa equals any of the naturally occurring L-amino acids
PKTSPSPEVSYTTPAPKDVLLPHKPYPEVSQSEPAPLETRGIPFIPMISPSPSQEELQTTLEETDQSTQEPFTTKIPRTXELAKTTQAPHRFYTTVRPRTSDKPHIRPVLNRTTTRPTRPKPSGMPSGNGVGTGVKQAPRPSGADRNVSVXSTHPTKKPGTXRPPLPPSRRGREFPGRRAH

SEQ ID NO: 911 - protein, 161 aa, Homo sapiens
MLSSLGCLLLCGSITLALGNAQKLPKGKRPNLKVHINTTSDSILLKFLRPSPNVKLEGLLLGYGSNVSPNQYFPLPAEGKFTEAIVDAEPKYLIVVRPAPPPSQKKSCSGKTRSRKPLQLVVGTLTPSSVFLSWGFLINPHHDWTLPSHCPNDRFYTIRYR

SEQ ID NO: 912 - protein, 778 aa, Homo sapiens
MLSSLGCLLLCGSITLALGNAQKLPKGKRPNLKVHINTTSDSILLKFLRPSPNVKLEGLLLGYGSNVSPNQYFPLPAEGKFTEAIVDAEPKYLIVVRPAPPPSQKKSCSGKTRSRKPLQLVVGTLTPSSVFLSWGFLINPHHDWTLPSHCPNDRFYTIRYREKDKEKKWIFQICPATETIVENLKPNTVYEFGVKDNVEGGIWSKIFNHKTVVGSKKVNGKIQSTYDQDHTVPAYVPRKLIPITIIKQVIQNVTHKDSAKSPEKAPLGGVILVHLIIPGLNETTVKLPASLMFEISDALKTQLAKNETLALPAESKTPEVEKISARPTTVTPETVPRSTKPTTSSALDVSETTLVLSKRTPETLQTILIPQFELPLSTLAPKSLPEFPEAKTPFPFEKPRGTLASSEKPWIVPTAKISEDSKVLQPQTATYDVFSSPTTSDEPEISDSYTATSDRILDSIPPKTSRTLEQPRATLAPSETPFVPQKLEIFTSPEMQPTTPAPQQTTSIPSTPKRRPRPKPPRTKPERTTSAGTITPKISKSPEPTWTTPAPGKTQFISLKPKIPLSPEVTHTKPAPKQTPRAPPKPKTSPRPRIPQTQPVPKVPQRVTAKPKTSPSPEVSYTTPAPKDVLLPHKPYPEVSQSEPAPLETRGIPFIPMISPSPSQEELQTTLEETDQSTQEPFTTKIPRTTELAKTTQAPHRFYTTVRPRTSDKPHIRPVLNRTTTRPTRPKPSGMPSGNGVGTGVKQAPRPSGADRNVSVDSTHPTKKPGTRRPPLPP

SEQ ID NO: 913 - protein, 132 aa, Homo sapiens
  SITE (70): Xaa equals any of the naturally occurring L-amino acids
SFRTAPRGPHVKESHASGLLSNQINLQSFDFKRMLLCRLNITGLCWGPKRTRCALGGQTGLQHHPSNEKXRHSGKEDLFLSICLGWGTTVNMACNNQRGRGYQTQRNSSPVYQEELLFFCTSLFSRLFSLKG

SEQ ID NO: 914 - protein, 33 aa, Homo sapiens
MNHLSISIALFLLCCVHLSLGLSVFPFQEDRSV

SEQ ID NO: 915 - protein, 102 aa, Homo sapiens [sequence omitted]

SEQ ID NO: 916 - protein, 85 aa, Homo sapiens
IKTVFLGQRYTDPNFIAVVFIHLPIDILKAPARPGTVAHACNLSTLVGRGGRITRSRDQDHPGQRGETLSLLKIQKLAGHGGARL

SEQ ID NO: 917 - protein, 33 aa, Homo sapiens
MISCLCNFIAHCVALVMRTCMLVVSSNFAPSFL

SEQ ID NO: 918 - protein, 33 aa, Homo sapiens; identical to SEQ ID NO: 917

SEQ ID NO: 919 - protein, 101 aa, Homo sapiens [sequence omitted]

SEQ ID NO: 920 - protein, 60 aa, Homo sapiens
MRKWGLMKLIASMMQPVLLELLSVWRKEGRDSRNIHDSHSMYVLRKRLSGSWLQQVCTLL

SEQ ID NO: 921 - protein, 79 aa, Homo sapiens [sequence omitted]

SEQ ID NO: 922 - protein, 245 aa, Homo sapiens
MADVSAKDSSQETLVNLAGLLVSLLMLPLVSGCPGFSLGCFFFLTALHIYANYRAVRALVMETLNEGRLRLVLKHYLQRGEVLDPTAANRMEPLWTGFWPAPSLSLGVPLHRLVSSVFELQQLVEGHQESYLLCWDQSQNQVQVVLNQKAGPKTILRAATHGLMLGALQGDGPLPAELEELRNRVRAGPKKESWVVVKETHEVLDMLFPKFLKGLQDAGWKTEKHQLEVDEWRATWLLSPEKKVL

SEQ ID NO: 923 - protein, 75 aa, Homo sapiens
  SITE (62): Xaa equals any of the naturally occurring L-amino acids
  SITE (63): Xaa equals any of the naturally occurring L-amino acids
LPVQNGCPESAMEMNGRAPCWEVGLEELSSRKLTAGPQFPSEPQAPAPSLFRQCLLWFCGMXXGGVGSPPPLTQE

SEQ ID NO: 924 - protein, 186 aa, Homo sapiens
MLPLVSGCPGFSLGCFFFLTALHIYANYRAVRALVMETLNEGRLRLVLKHYLQRGEVLDPTAANRMEPLWTGFWPAPSLSLGVPLHRLVSSVFELQQLVEGHQESYLLCWDQSQNQVQVVLNQKAGPKTILRAATHGLMLGALQGDGPLPAELEELRNRVRAGPRKRAGSSSRRHTKCWTCCSQSS

SEQ ID NO: 925 - protein, 40 aa, Homo sapiens
MRRQTFMSILVFQCSPISFGLCINKERTVVSSVITDNLCL

SEQ ID NO: 926 - protein, 40 aa, Homo sapiens; identical to SEQ ID NO: 925

SEQ ID NO: 927 - protein, 73 aa, Homo sapiens
  SITE (60): Xaa equals any of the naturally occurring L-amino acids
SLLLSCCPLGNRAYGATGAEVASRASLEGSEHSMQRSHREAGNQGPGRAASCASPAFVMXFSFFTHCQICFLP

SEQ ID NO: 928 - protein, 7 aa, Homo sapiens
EAPWQFS

SEQ ID NO: 929 - protein, 23 aa, Homo sapiens
MFLKAQWLYSLLLNCLLPEGTSS

SEQ ID NO: 930 - protein, 23 aa, Homo sapiens
MFLKAQWLYSLLLNCLLPEGTSS

SEQ ID NO: 931 - protein, 64 aa, Homo sapiens
RTLRMSPSAFCYSLTLLACWRAAWIPTCVPRAAGEMDSPGLADGHWCSGAARRSPHYVARSLVL

SEQ ID NO: 932 - protein, 822 aa, Homo sapiens
MAAAVVVAEGDSDSRPGQELLVAWNTVSTGLVPPAALGLVSSRTSGAVPPKEEELRAAVEVLRGHGLHSVLEEWFVEVLQNDLQANISPEFWNAISQCENSADEPQCLLLLLDAFGLLESRLDPYLRSLELLEKWTRLGLLMGTGAQGLREEVHTMLRGVLFFSTPRTFQEMIQRLYGCFLRVYMQSKRKGEGGTDPELEGELDSRYARRRYYRLLQSPLCAGCSSDKQQCWCRQALEQFHQLSQVLHRLSLLERVSAEAVTTTLHQVTRERMEDRCRGEYERSFLREFHKWIERVVGWLGKVFLQDGPARPASPEAGNTLRRWRCHVQRFFYRIYASLRIEELFSIVRDFPDSRPAIEDLKYCLERTDQRQQLLVSLKAALETRLLHPGVNTCDIITLYISAIKALRVLDPSMVILEVACEPIRRYLRTREDTVRQIVAGLTGDSDGTGDLAVELSKTDPASLETGQDSEDDSGEPEDWVPDPVDADPGKSSSKRRSSDIISLLVSIYGSKDLFINEYRSLLADRLLHQFSFSPEREIRNVELLKLRFGEAPMHFCEVMLKDMADSRRINANIREEDEKRPAEEQPPFGVYAVILSSEFWPPFKDEKLEVPEDIRAALEAYCKKYEQLKAMRTLSWKHTLGLVTMDVELADRTLSVAVTPVQAVILLYFQDQASWTLEELSKAVKMPVALLRRRMSVWLQQGVLREEPPGTFSVIEEERPQDRDNMVLIDSDDESDSGMASQADQKEEELLLFWTYIQAMLTNLESLSLDRIYNMLRMFVVTGPALAEIDLQELQGYLQKKVRDQQLVYSAGVYRLPKNCS

SEQ ID NO: 933 - protein, 157 aa, Homo sapiens
MSPWLLLLLVVGSWLLARILAWTYAFYNNCRRLQCFPQPPKRNWFWGHLGLITPTEEGLKDSTQMSATYSQGFTVWLGPIIPFIVLCHPDTIRSITNASAAIAPKDNLFIRFLKPWLGEYLQVKGVGDNLAGRVGEVLLLPIVLGCPTRRRDTAEWR

SEQ ID NO: 934 - protein, 13 aa, Homo sapiens
LVIGGWGQRRLYR

SEQ ID NO: 935 - protein, 126 aa, Homo sapiens
  SITE (119): Xaa equals any of the naturally occurring L-amino acids
MSPWLLLLLVVGSWLLARILAWTYAFYNNCRRLQCFPQPPKRNWFWGHLGLITPTEEGLKDSTQMSATYSQGFTVWLGPIIPFIVLCHPDTIRSITNASAAIAPKDNLFIRFLKPWLGXRDTAEWR

SEQ ID NO: 936 - protein, 90 aa, Homo sapiens
  SITE (22): Xaa equals any of the naturally occurring L-amino acids
  SITE (25): Xaa equals any of the naturally occurring L-amino acids
  SITE (26): Xaa equals any of the naturally occurring L-amino acids
QNTIECGSSTAGVCCSQLWRLXVQXXGTGRLHVWWGPASWSIASTFSLHPYVVEEAGELSGVSFVTPFLRLVHSHDLITSQRPCLLTPLP

SEQ ID NO: 937 - protein, 58 aa, Homo sapiens [sequence omitted]

SEQ ID NO: 938 - protein, 34 aa, Homo sapiens
LCVSHPGITCTPLWLCVISQNMELILMFRRPKLT

SEQ ID NO: 939 - protein, 6 aa, Homo sapiens
TLTAKT

SEQ ID NO: 940 - protein, 58 aa, Homo sapiens [sequence omitted]

SEQ ID NO: 941 - protein, 44 aa, Homo sapiens
  SITE (3): Xaa equals any of the naturally occurring L-amino acids
LKXITICCLQKTHLHSKGTERMKVKGWERVYWGNITEGNMMNLY

SEQ ID NO: 942 - protein, 9 aa, Homo sapiens
LGAFSWSPK

SEQ ID NO: 943 - protein, 96 aa, Homo sapiens
MARSLLIILGADFTFPTSFNCFQKMNLAKKSRGSFTHLLTHSWCLSLFLKEADQGLRENNFDFSHVCPSKPPLWTDSPSVPGRNWDNPRTFLVPSR

SEQ ID NO: 944 - protein, 96 aa, Homo sapiens; identical to SEQ ID NO: 943

SEQ ID NO: 945 - protein, 26 aa, Homo sapiens
  SITE (3): Xaa equals any of the naturally occurring L-amino acids
  SITE (5): Xaa equals any of the naturally occurring L-amino acids
MLXFXFFLLFFFFFWWCCLAFFSFPF

SEQ ID NO: 946 - protein, 77 aa, Homo sapiens [sequence omitted]

SEQ ID NO: 947 - protein, 77 aa, Homo sapiens [sequence omitted]

SEQ ID NO: 948 - protein, 11 aa, Homo sapiens
MWRWLSSFWLL

SEQ ID NO: 949 - protein, 11 aa, Homo sapiens
MWRWLSSFWLL

SEQ ID NO: 950 - protein, 378 aa, Homo sapiens
AREKPYLVEEAVSYNELDYVSVGLDQQTVKLVCTNRRKQFLLDTADVALAEFFLASLKSAMIKGCREPPYPSILTDATMEKLALAKFVAQESKCEASAVTVRFYGLVHWEDPTDESLGPTPCHCSPPEGTITKEGMLHYKAGTSYLGKEHWKTCFVVLSNGILYQYPDRTDVIPLLSVNMGGEQCGGCRRANTTDRPHAFQVILSDRPCLELSAESEAEMAEWMQHLCQAVSKGVIPQGVAPSPCIPCCLVLTDDRLFTCHEDCQTSFFRSLGTAKLGDISAVSTEPGKEYCVLEFSQDSQQLLPPWVIYLSCTSELDRLLSALNSGWKTIYQVDLPHTAIQEASNKKKFEDALSLIHSAWQRSDSLCRGRASRDPWC

SEQ ID NO: 951 - protein, 134 aa, Homo sapiens
SPARHPTTSSRHTWWESGNAVPPGSPFHGRPLLLLQPAGPVPFQDQPFDPSQGPWPGLHCRPQGLMHSMCLPDLTPEDGGKAQDHTALGHSREQDTPGVQENFQGAAPLDRYTRRFNTLYYLGNQRRGIIKTRK

SEQ ID NO: 952 - protein, 58 aa, Homo sapiens
MATASINNLISSLLLHLSLLSSKAGKFLIWKEHKTACGCYANSTCLLPNGLSNHKGKS

SEQ ID NO: 953 - protein, 58 aa, Homo sapiens; identical to SEQ ID NO: 952

SEQ ID NO: 954 - protein, 63 aa, Homo sapiens
ENKRLHFGEASTLSGLLFCFMSWCLGEDLAGFIQSGRVWAILENVPSISENKSAPSTCLHPGD

SEQ ID NO: 955 - protein, 77 aa, Homo sapiens
MAGLGLLSLVQFSVTGGHWTGIADSLVATLGCRLSGSVPPPLLPAPSGHSRALHQTLTWCLHLLSLSPSSNPWKSLV

SEQ ID NO: 956 - protein, 77 aa, Homo sapiens; identical to SEQ ID NO: 955

SEQ ID NO: 957 - protein, 27 aa, Homo sapiens
MRARTLPPSLLCLWCLAPYLNICWMNG

SEQ ID NO: 958 - protein, 28 aa, Homo sapiens
  SITE (14): Xaa equals any of the naturally occurring L-amino acids
AQWLTPVIPALWWXEEGGSPEVRSSRPA

SEQ ID NO: 959 - protein, 27 aa, Homo sapiens
MRARTLPPSLLCLWCLAPYLNICWMNG

SEQ ID NO: 960 - protein, 13 aa, Homo sapiens
PPRASWSPREHVL

SEQ ID NO: 961 - protein, 70 aa, Homo sapiens
  SITE (2): Xaa equals any of the naturally occurring L-amino acids
  SITE (3): Xaa equals any of the naturally occurring L-amino acids
MXXHESILLVSLDLLPTSILLVSLWICSPPPSSWVNPGSFVGYLERKRQKLICQMTRTNRLFGMKRKTSG

SEQ ID NO: 962 - protein, 53 aa, Homo sapiens
  SITE (47): Xaa equals any of the naturally occurring L-amino acids
SLALNSPPPGLRVPREERLLATSLLQGALPAGPCPSTTLLSWHRPAXPPGAQG

SEQ ID NO: 963 - protein, 65 aa, Homo sapiens
SILLVSLDLLPTSILLVSLWICSPPPSSWVNPGSFVGYLERKRQKLICQMTRTNRLFGMKRKTSG

SEQ ID NO: 964 - protein, 3 aa, Homo sapiens
DLK

SEQ ID NO: 965 - protein, 9 aa, Homo sapiens
MNEKFLPPL

SEQ ID NO: 966 - protein, 51 aa, Homo sapiens
MLRPPRWALMAASSHPPPLWSWVLGLAAHPTGMSPGTGPHHGWVSASSSSS

SEQ ID NO: 967 - protein, 244 aa, Homo sapiens
  SITE (25): Xaa equals any of the naturally occurring L-amino acids
  SITE (40): Xaa equals any of the naturally occurring L-amino acids
  SITE (41): Xaa equals any of the naturally occurring L-amino acids
  SITE (43): Xaa equals any of the naturally occurring L-amino acids
  SITE (231): Xaa equals any of the naturally occurring L-amino acids
  SITE (237): Xaa equals any of the naturally occurring L-amino acids
MRAPFNTLFGRLFGLLLVAIVLAHXLAFFWFHHYGPPPPXXAXFVEQPDGSLTPLRKAPRPWFGGPVVPLTFQFISLIIAAWYGAKLLSRPIQRLSAAAERLSVDLDSPPLVETGPREARQAASTFNLMQKRIREQVSQRARMLGAVSHDLRTPLSRLKLRLEQIEDPKLQGQMRQDLDDMIGMLDATLSYLHEQRTSETRHWLDVQALVESLSENAQDQGRDVQFFFGGXPPGGGXPKTPPPF

SEQ ID NO: 968 - protein, 244 aa, Homo sapiens
  SITE (231): Xaa equals any of the naturally occurring L-amino acids
  SITE (237): Xaa equals any of the naturally occurring L-amino acids
MRAPFNTLFGRLFGLLLVAIVLAHVLAFFWFHHYGPPPPPRAAFVEQPDGSLTPLRKAPRPWFGGPVVPLTFQFISLIIAAWYGAKLLSRPIQRLSAAAERLSVDLDSPPLVETGPREARQAASTFNLMQKRIREQVSQRARMLGAVSHDLRTPLSRLKLRLEQIEDPKLQGQMRQDLDDMIGMLDATLSYLHEQRTSETRHWLDVQALVESLSENAQDQGRDVQFFFGGXPPGGGXPKTPPPF

SEQ ID NO: 969 - protein, 85 aa, Homo sapiens
GIGSRVRAAFIALEPSLGMGFSKNWQAHRLPSKWVRTAYPSIETHYLFYLFLSGSGARCSYFSHLRWDILGQTREILEAISVVNP

SEQ ID NO: 970 - protein, 54 aa, Homo sapiens
  SITE (34): Xaa equals any of the naturally occurring L-amino acids
  SITE (35): Xaa equals any of the naturally occurring L-amino acids
  SITE (46): Xaa equals any of the naturally occurring L-amino acids
MKTVSLLLTLWFSQTFSFNLFFAPPHSLLQSSIXXSVSSITTVHPXLGLLFCIL

SEQ ID NO: 971 - protein, 37 aa, Homo sapiens
ILLGLWQSVLGSSIWGQPLSYNCQEPHNCLFNHSDFK

SEQ ID NO: 972 - protein, 56 aa, Homo sapiens
MKTVSLLLTLWFSQTFSFNLFFAPPHSLLQSSIFFSVSSITTVHPILVFFFAFFRT

SEQ ID NO: 973 - protein, 65 aa, Homo sapiens
KLTQAGSGYVHREIFPRVCFFDILSPSFYLLAGISCPTTPVIICKPLYSFQCLKVIHKEGRNKRV

SEQ ID NO: 974 - protein, 11 aa, Homo sapiens
MTLSNWEYGFH

SEQ ID NO: 975 - protein, 60 aa, Homo sapiens [sequence omitted]

SEQ ID NO: 976 - protein, 24 aa, Homo sapiens
ICLWGRPNLTTQGTLKGISGRRSQ

SEQ ID NO: 977 - protein, 128 aa, Homo sapiens
PETFLLVTGSQWGILGCQGPRVTCVQLFYGSRGLSLRQATKCPGCHPPWSPSVPHAWSPASPRIPVAFISGQLPARPGLGHGLRHEARPPPAPLPRGSSIPLHFWNVCASMMFVYLRHLKIYFRYEGK

SEQ ID NO: 978 - protein, 23 aa, Homo sapiens
ICLWGRPNLTTQGTLKGISGRRS

SEQ ID NO: 979 - protein, 78 aa, Homo sapiens
RHLQVGGGQHQCGQACLDSSYRPLLCMMWEPGHSHAPSRAQGCGSTTEHPLSHCPPLPRALPSPPLLHHSSFKVPLLY

SEQ ID NO: 980 - protein, 98 aa, Homo sapiens
  SITE (72): Xaa equals any of the naturally occurring L-amino acids
MPLQRRVKVKTTSSRCLPGTTWGLTLFSMLCCFWPLGIAAFYFSQGTSKAISKGDFRLASTTSRRALFLATXAIAVGAGLYVAVVVALAAYMSQNGHG

SEQ ID NO: 981 - protein, 68 aa, Homo sapiens
MPLQRRVKVKTTSSRCLPGTTWDLLSSPCSAASGHWALLPSTSPRGPARPSPKGTSAWPAPPPAGPSS

SEQ ID NO: 982 - protein, 68 aa, Homo sapiens
  SITE (25): Xaa equals any of the naturally occurring L-amino acids
  SITE (51): Xaa equals any of the naturally occurring L-amino acids
  SITE (56): Xaa equals any of the naturally occurring L-amino acids
MLLPLFTLLILLLRVFPKEIIQNRXKLKAEKCWNMTLFIAVGKMGGWGTWXMLEIXALCEGPVGEDAL

SEQ ID NO: 983 - protein, 8 aa, Homo sapiens
RVFPVTTL

SEQ ID NO: 984 - protein, 32 aa, Homo sapiens
MLLPLFTLLILLLRVFPKEIIQNRKKLKAEKC

SEQ ID NO: 985 - protein, 10 aa, Homo sapiens
MGLFLFLVSS

SEQ ID NO: 986 - protein, 10 aa, Homo sapiens
MGLFLFLVSS

SEQ ID NO: 987 - protein, 56 aa, Homo sapiens
MLTGVISGSTGAMALSLASLSAHCFAFRCLAAPFYFFAGLGKHGRRILISFLFSAW

SEQ ID NO: 988 - protein, 56 aa, Homo sapiens; identical to SEQ ID NO: 987

SEQ ID NO: 989 - protein, 56 aa, Homo sapiens
  SITE (3): Xaa equals any of the naturally occurring L-amino acids
  SITE (46): Xaa equals any of the naturally occurring L-amino acids
AEXAPLHFHLGDGERLHLKKKKNKKKKPKQGWARWLTPVISALLEXGAGVSPEVMS

SEQ ID NO: 990 - protein, 29 aa, Homo sapiens
MLVIIIMTALVSHVPSVHSVPHAVPFTSS

SEQ ID NO: 991 - protein, 29 aa, Homo sapiens
MLVIIIMTALVSHVPSVHSVPHAVPFTSS

SEQ ID NO: 992 - protein, 60 aa, Homo sapiens
  SITE (7): Xaa equals any of the naturally occurring L-amino acids
  SITE (34): Xaa equals any of the naturally occurring L-amino acids
VFKTIRXREIILYHENSTGKTHPHDSLISHWVPXTTQGNYGSYKMRFGWGHRARPYQPPK

SEQ ID NO: 993 - protein, 53 aa, Homo sapiens
  SITE (28): Xaa equals any of the naturally occurring L-amino acids
MDIQGKALYIRFLLTLCQMVVSVMGKRXQGRRGLGGAAAVGREICRRWGCCVT

SEQ ID NO: 994 - protein, 12 aa, Homo sapiens
LCWTRSSVIGAH

SEQ ID NO: 995 - protein, 53 aa, Homo sapiens
MDIQGKALYIRFLLTLCQMVVSVMGKRRQGRRGLGGAAAVGREICRRWGCCVT

SEQ ID NO: 996 - protein, 53 aa, Homo sapiens
  SITE (21): Xaa equals any of the naturally occurring L-amino acids
KQGSLLGWSRVIMVRGAQSYXKGVLCRHWKKFGFYSKWNWKPLECFQNRSDVI

SEQ ID NO: 997 - protein, 53 aa, Homo sapiens
MRLILFAMSPKLLFLFLFLYISVKSFDLVLSFRSVLFMSDLIHCFYHQLHFKL

SEQ ID NO: 998 - protein, 53 aa, Homo sapiens; identical to SEQ ID NO: 997

SEQ ID NO: 999 - protein, 79 aa, Homo sapiens
  SITE (34): Xaa equals any of the naturally occurring L-amino acids
LGIWLIPGLRRANPKISLEYLMVPENKYSKNCEXMLKGLRSQPEGAANGQSWNNSNKVNKYSIGLLLNKCMIHESTLKD

SEQ ID NO: 1000 - protein, 43 aa, Homo sapiens
MFHRFFILSALSRIRALTTFLDDLGMTHQTLLLLLGPSIYSFC

SEQ ID NO: 1001 - protein, 43 aa, Homo sapiens; identical to SEQ ID NO: 1000

SEQ ID NO: 1002 - protein, 111 aa, Homo sapiens
  SITE (45): Xaa equals any of the naturally occurring L-amino acids
  SITE (99): Xaa equals any of the naturally occurring L-amino acids
  SITE (104): Xaa equals any of the naturally occurring L-amino acids
  SITE (108): Xaa equals any of the naturally occurring L-amino acids
  SITE (109): Xaa equals any of the naturally occurring L-amino acids
  SITE (111): Xaa equals any of the naturally occurring L-amino acids
VQVLTQYYQSNILNILSQVICLSIVYFEGFLSFTFNLFFISISSXVALSYSYPDIHLISEGLDITLVKMQSDLILFLKQTAVLLERPRAHRFSTRVGYXVSVHXSGSXXVX

SEQ ID NO: 1003 - protein, 43 aa, Homo sapiens
  SITE (13): Xaa equals any of the naturally occurring L-amino acids
MLYVRLLKNTKIXVLILPLFILFLTLFLFIPNGFLFVFVSLYF

SEQ ID NO: 1004 - protein, 118 aa, Homo sapiens [sequence omitted]

SEQ ID NO: 1005 - protein, 64 aa, Homo sapiens
  SITE (55): Xaa equals any of the naturally occurring L-amino acids
  SITE (59): Xaa equals any of the naturally occurring L-amino acids
  SITE (63): Xaa equals any of the naturally occurring L-amino acids
SIKSCSSFYLGSRVNRAQLTNYPPAMRTYVYECHCDKSTSRATAGPSIFHPGGVXGMWXIFAXV

SEQ ID NO: 1006 - protein, 42 aa, Homo sapiens
  SITE (21): Xaa equals any of the naturally occurring L-amino acids
  SITE (23): Xaa equals any of the naturally occurring L-amino acids
  SITE (42): Xaa equals any of the naturally occurring L-amino acids
HSPESCYSFNLGSRMRISVEXKXAKSNSAADNPETLRKGYVX

SEQ ID NO: 1007 - protein, 76 aa, Homo sapiens
MLVLLSLLASGGLPLLLVGDVLASKSSTVLFLPGDSSPGCSMITPLPPSRMCLKAGSSGEQTVVPLSLLLRSKSSK

SEQ ID NO: 1008 - protein, 76 aa, Homo sapiens
  SITE (71): Xaa equals any of the naturally occurring L-amino acids
MLVLLSLLASGGLPLLLVGDVLASKSSTVLFLPGDSSPGCSMITPLPPSRMCLKAGSSGEQTVVPLSLLLXSKSSK

SEQ ID NO: 1009 - protein, 9 aa, Homo sapiens
CHLQHSCRE

SEQ ID NO: 1010 - protein, 34 aa, Homo sapiens
MTALFCSLLHSLVSLLLPTKWGQGKAFLTGPLFS

SEQ ID NO: 1011 - protein, 10 aa, Homo sapiens
FSCCLSLPIS

SEQ ID NO: 1012 - protein, 71 aa, Homo sapiens
MWCLVFCSCVSLPRMMASSFIHDIAKDMISFLFMSAWYYTYFNSFEIYRFQFTFIEYSLWVKHHASLPGVQ

SEQ ID NO: 1013 - protein, 71 aa, Homo sapiens; identical to SEQ ID NO: 1012

SEQ ID NO: 1014 - protein, 74 aa, Homo sapiens
ARREGRSRTAVGSTPAAPLSLTRGGQCPSRGSPLALFGHPLASQKHSETKTFPFPPPHMVLRLPAAMQLKQLIF

SEQ ID NO: 1015 - protein, 21 aa, Homo sapiens
MSLSLISLSFLFPAGAGRRSC

SEQ ID NO: 1016 - protein, 21 aa, Homo sapiens
MSLSLISLSFLFPAGAGRRSC

SEQ ID NO: 1017 - protein, 25 aa, Homo sapiens
MLHWGVLCSLFLMLFNEGASASLQQ

SEQ ID NO: 1018 - protein, 55 aa, Homo sapiens
MLHWGVLCSLFLMLFNEGASASLSNKRSMREDRAVHGYGYWTRIFGKVKADHWIW

SEQ ID NO: 1019 - protein, 95 aa, Homo sapiens
  SITE (13): Xaa equals any of the naturally occurring L-amino acids
MRACLCAGVCMCXASCLGLPMNVVECYTWRVLVFHQFQDEELHDTVDLETIPLERQPRDVQHPVSTRILYLHVYFVAVTLTLIRILQLWTEAFSP

SEQ ID NO: 1020 - protein, 261 aa, Homo sapiens
MELLQVTILFLLPSICSSNSTGVLEAANNSLVVTTTKPSITTPNTESLQKNVVTPTTGTTPKGTITNELLKMSLMSTATFLTSKDEGLKATTTDVRKNDSIISNVTVTSVTLPNAVSTLQSSKPKTETQSSIKTTEIPGSVLQPDASPSKTGTLTSIPVTIPENTSQSQVIGTEGGKNASTSATSRSYSSIILPVVIALIVITLSVFVLVGLYRMCWKADPGTPENGNDQPQSDKESVKLLTVKTISHESGEHSAQGKTKN

SEQ ID NO: 1021 - protein, 260 aa, Homo sapiens [sequence omitted]

SEQ ID NO: 1022 - protein, 53 aa, Homo sapiens
CVLEPTSSQSIAPDLGRESTFSIQRNKNMQFMVVLWTLTDCEGKVYPKAVICR

SEQ ID NO: 1023 - protein, 41 aa, Homo sapiens
MMLPVISLFLISLHLPIFCFQRLLLFKGFLFIANSSNLHIK

SEQ ID NO: 1024 - protein, 41 aa, Homo sapiens; identical to SEQ ID NO: 1023

SEQ ID NO: 1025 - protein, 162 aa, Homo sapiens
  SITE (16): Xaa equals any of the naturally occurring L-amino acids
  SITE (17): Xaa equals any of the naturally occurring L-amino acids
  SITE (18): Xaa equals any of the naturally occurring L-amino acids
KTVMLPIAQEVQSPVXXXCDKLAADCAHELRRHGVSCVSLWPGIVQTELLKEHMAKEEVLQDPVLKQFKSAFSSAETTELSGKCVVALATDPNILSLSGKVLPSCDLARRYGLRDVDGRPVQDYLSLSSVLSHVSGLGWLASYLPSFLRVPKWIIALYTSKF

SEQ ID NO: 1026 - protein, 45 aa, Homo sapiens
MARWLLPCLPPLHSVTSWLLTVPTSCGAMGSAVCLCGRGLCRQNC

SEQ ID NO: 1027 - protein, 37 aa, Homo sapiens
  SITE (29): Xaa equals any of the naturally occurring L-amino acids
LPPFPQCDKLAADCPTSCGAMGSAVCLCXRGLCRQNC

SEQ ID NO: 1028 - protein, 45 aa, Homo sapiens; identical to SEQ ID NO: 1026

SEQ ID NO: 1029 - protein, 29 aa, Homo sapiens
MDQFLQYLLECMLLCTTAGASGATYVPTR

SEQ ID NO: 1030 - protein, 42 aa, Homo sapiens
MDQFLQYLLECMLLCTTAGASGAHLCTNEMTLLEAILYLQWM

SEQ ID NO: 1031 - protein, 53 aa, Homo sapiens
CLILQEENRKELSNLANRYKIDSRVLSPTLGWQPVGQTPKTVADVFFCLPSLG

SEQ ID NO: 1032 - protein, 56 aa, Homo sapiens [sequence omitted]

SEQ ID NO: 1033 - protein, 4 aa, Homo sapiens
VWMP

SEQ ID NO: 1034 - protein, 56 aa, Homo sapiens [sequence omitted]

SEQ ID NO: 1035 - protein, 491 aa, Homo sapiens
  SITE (42): Xaa equals any of the naturally occurring L-amino acids
  SITE (43): Xaa equals any of the naturally occurring L-amino acids
  SITE (44): Xaa equals any of the naturally occurring L-amino acids
AARVGRHGRRRRSAAMAGRGGSALLALCGALAACGWLLGAEXXXPGAPAAGMRRRRRLQQEDGISFEYHRYPELREALVSVWLQCTAISRIYTVGRSFEGRELLVIELSDNPGVHEPGEPEFKYIGNMHGNEAVGRELLIFLAQYLCNEYQKGNETIVNLIHSTRIHIMPSLNPDGFEKAASQPGELKDWFVGRSNAQGIDLNRNFPDLDRIVYVNEKEGGPNNHLLKNMKKIVDQNTKLAPETKAVIHWIMDIPFVLSANLHGGDLVANYPYDETRSGSAHEYSSSPDDAIFQSLARAYSSFNPAMSDPNRPPCRKNDDDSSFVDGTTNGGAWYSVPGGMQDFNYLSSNCFEITVELSCEKFPPEETLKTYWEDNKNSLISYLEQIHRGVKGFVRDLQGNPIANATISVEGIDHDVTSAKDGDYWRLLIPGNYKLTASAPGYLAITKKVAVPYSPAAGVDFELESFSERKEEEKEELMEWWKMMSETLNF

SEQ ID NO: 1036 - protein, 255 aa, Homo sapiens
LLLWTMSVIFFACVVRVRDGLPLSASTDFYHTQDFLEWRRRLKSLALRLAQYPGRGSAEGCDFSIHFSSFGDVACMAICSCQCPAAMAFCFLETLWWEFTASYDTTCIGLASRPYAFLEFDSIIQKVKWHFNYVSSSQMECSLEKIQEELKLQPPAVLTLEDTDVANGVMNGHTPMHLEPAPNFRMEPVTALGILSLILNIMCAALNLIRGVHLAEHSLQVAHEEIGNILAFLVPFVACIFQDPRSWFCWLDQTS

SEQ ID NO: 1037 - protein, 99 aa, Homo sapiens
  SITE (44): Xaa equals any of the naturally occurring L-amino acids
MLLLLVFLVACFINRKCQKQRKKKPAEDILEEYPLNTKVEVPKXHPDRVEKNVNRHYCTVRNVNILSEPEAAYTFKGAKVKRLNLEVRVHNNLQDGTEV

SEQ ID NO: 1038 - protein, 5 aa, Homo sapiens
MPVLL

SEQ ID NO: 1039 - protein, 99 aa, Homo sapiens
MLLLLVFLVACFINRKCQKQRKKKPAEDILEEYPLNTKVEVPKRHPDRVEKNVNRHYCTVRNVNILSEPEAAYTFKGAKVKRLNLEVRVHNNLQDGTEV

SEQ ID NO: 1040 - protein, 70 aa, Homo sapiens
LLDLTNRLVTCIDQSKPNILASLSLAEQTRVGIWVGAFSIKDNLSLCSQGEHLCFVLKAGSPWFANCLQE

SEQ ID NO: 1041 - protein, 48 aa, Homo sapiens
MLQYTWLILVFLSSCLSATWFCKVVVAAIGSTVGSSRLHFKRSGQCLR

SEQ ID NO: 1042 - protein, 48 aa, Homo sapiens; identical to SEQ ID NO: 1041

SEQ ID NO: 1043 - protein, 52 aa, Homo sapiens
  SITE (39): Xaa equals any of the naturally occurring L-amino acids
MVAVDFSCLSFILLGILVLYIYFVMYACSIPTLFSVFYXEEMLNLSKLSCIY

SEQ ID NO: 1044 - protein, 13 aa, Homo sapiens
CFHFFLCPILVLV

SEQ ID NO: 1045 - protein, 1 aa, Homo sapiens
C

SEQ ID NO: 1046 - protein, 37 aa, Homo sapiens
MVAVDFSCLSFILLGILVLYIYFVMYACSIPTLFSVL

SEQ ID NO: 1047 - protein, 6 aa, Homo sapiens
NLSKII

SEQ ID NO: 1048 - protein, 183 aa, Homo sapiens [sequence omitted]

SEQ ID NO: 1049 - protein, 183 aa, Homo sapiens [sequence omitted]

SEQ ID NO: 1050 - protein, 31 aa, Homo sapiens
  SITE (9): Xaa equals any of the naturally occurring L-amino acids
PGPPLSFFXFFFFFFFFFFFFFFKHCIQVSL

SEQ ID NO: 1051 - protein, 63 aa, Homo sapiens
  SITE (54): Xaa equals any of the naturally occurring L-amino acids
MNHCCSSQRFLNILSFCISPPFPLTFIYLIMYLFIYLYTFAPFSTNTKQSKKKXYIYISVYVL

SEQ ID NO: 1052 - protein, 63 aa, Homo sapiens
MNHCCSSQRFLNILSFCISPPFPLTFIYLIMYLFIYLYTFAPFSTNTKQSKKKKYIYISVYVL

SEQ ID NO: 1053 - protein, 75 aa, Homo sapiens
  SITE (9): Xaa equals any of the naturally occurring L-amino acids
ADNNFTQEXAMTMITPSSKLTLTKGNKSWSSTAVAAALELVDPPGCRNSARDNQFILLNWHILNHDSQQLGNIFF

SEQ ID NO: 1054 - protein, 113 aa, Homo sapiens
  SITE (31): Xaa equals any of the naturally occurring L-amino acids
  SITE (79): Xaa equals any of the naturally occurring L-amino acids
  SITE (102): Xaa equals any of the naturally occurring L-amino acids
  SITE (111): Xaa equals any of the naturally occurring L-amino acids
CGVFWLLSLLCCIKEQQFEQVVALLLQSIRXCQDRALLVNNAYQGLASLVKVSELAAFKVVVQEEGGSGLSLIKETYQXHRGRTRRWWENVGMLLVPPGFLXRRSCRSWCXVV

SEQ ID NO: 1055 - protein, 2 aa, Homo sapiens
IL

SEQ ID NO: 1056 - protein, 161 aa, Homo sapiens
MAEASCGVFWLLSLLCCIKEQQFEQVVALLLQSIRLCQDRALLVNNAYQGLASLVKVSELAAFKVVVQEEGGSGLSLIKETYQLHRDDPEVVENVGMLLVHLASYEEILPELVSSSMKALLQEIKERFTSSLELVSCVEKVLLRLEAATSPSPLGGEAAQP

SEQ ID NO: 1057 - protein, 491 aa, Homo sapiens; identical to SEQ ID NO: 1035
  SITE (42): Xaa equals any of the naturally occurring L-amino acids
  SITE (43): Xaa equals any of the naturally occurring L-amino acids
  SITE (44): Xaa equals any of the naturally occurring L-amino acids

SEQ ID NO: 1058 - protein, 79 aa, Homo sapiens
  SITE (15): Xaa equals any of the naturally occurring L-amino acids
  SITE (21): Xaa equals any of the naturally occurring L-amino acids
  SITE (49): Xaa equals any of the naturally occurring L-amino acids
  SITE (65): Xaa equals any of the naturally occurring L-amino acids
  SITE (66): Xaa equals any of the naturally occurring L-amino acids
MRLASSLSVFPLLPXTCGHSXALLPSSIGQHSETFTRCRPLTFPVFRTXKPMNPYEITQFCGILXXATQTGLKTGTLHG

SEQ ID NO: 1059 - protein, 20 aa, Homo sapiens
REKSSLSVPVLVCLCCYNRI

SEQ ID NO: 1060 - protein, 244 aa, Homo sapiens
LVPLVFSLLVQSCKQVYRSIAMKFVPCLLLVTLSCLGTLGQAPRQKQGSTGEEFHFQTGGRDSCTMRPSSLGQGAGEVWLRVDCRNTDQTYWCEYRGQPSMCQAFAADPKSYWNQALQELRRLHHACQGAPVLRPSVCREAGPQAHMQQVTSSLKGSPEPNQQPEAGTPSLRPKATVKLTEATQLGKDSMEELGKAKPTTRPTAKPTQPGPRPGGNEEAKKKAWEHCWKPFQALCAFLISFFRG

SEQ ID NO: 1061 - protein, 70 aa, Homo sapiens
MRLASSLSVFPLLPLTCGHSLALLPSSIGQHSETFTRCRPLTFPVFRTINQVNPYKSPSLWYSVIATQTD

SEQ ID NO: 1062 - protein, 304 aa, Homo sapiens
TCPLLRNSSHAEPAHRQDGDLALTPCLGPGLGNPGRVRQKAGNRSSGGYSLRGQQHLGPLLLATAGAAGARERGQALHGVEMVAVRADVWHVRGRWRQLGHRPVARLHQLFAVVLFQQLLQGRSILFLLCDQAHQDPNGVLIGILSPVGRVDSTASTSRAGPDLLVRRAVVALPLEEVAHQDAQQPHEAEDRDDGDDRVLGGCLLWATCPGAVPRLPCLTTAAGPCCHLHATSGPPPPLITAMSTQRCPGTWLTWNAGNPPRPKPPRPAVSTECISSCHAHLGLQPPPKAATGMGLAWAGAPCS

SEQ ID NO: 1063 - protein, 52 aa, Homo sapiens
MGGCLLSLSLCFVPVVRLAASVARWAWLEPWVRQVAGGDRERLRGKWWHLLL

SEQ ID NO: 1064 - protein, 52 aa, Homo sapiens; identical to SEQ ID NO: 1063

SEQ ID NO: 1065 - protein, 58 aa, Homo sapiens
DLSGGEWNVTTRTRLWEIQPHLCFVMILKLDFSCRDFLSILPGVLTYSLPVKRFKKKN

SEQ ID NO: 1066 - protein, 21 aa, Homo sapiens
CFFQLSPEEVSWCPNVGSSFD

SEQ ID NO: 1067 - protein, 37 aa, Homo sapiens
  SITE (5): Xaa equals any of the naturally occurring L-amino acids
MGKLXLTLLLCLLQLLPPEVYYSRWGANMMAQTPLNP

SEQ ID NO: 1068 - protein, 62 aa, Homo sapiens
MGKLTLTLLLCLLQLLPPEVYYSRWGANMMAQTPLNSMRSPWPMEILLFFPLFSSSVFIGSA

SEQ ID NO: 1069 - protein, 63 aa, Homo sapiens
MSLDSLVLVKALFCFTFVVQITLSNISSTNVSILVFVHTAITSPLQTFQFWHYEEVAVNLKYL

SEQ ID NO: 1070 - protein, 63 aa, Homo sapiens; identical to SEQ ID NO: 1069

SEQ ID NO: 1071 - protein, 2 aa, Homo sapiens
LQ

SEQ ID NO: 1072 - protein, 2 aa, Homo sapiens
LQ

SEQ ID NO: 1073 - protein, 48 aa, Homo sapiens
  SITE (38): Xaa equals any of the naturally occurring L-amino acids
  SITE (42): Xaa equals any of the naturally occurring L-amino acids
  SITE (44): Xaa equals any of the naturally occurring L-amino acids
MGLRQQLELKLKLILLLCVFWFKSCTYILALLFLYSGXMWVXHXGRKI

SEQ ID NO: 1074 - protein, 261 aa, Homo sapiens
  SITE (90): Xaa equals any of the naturally occurring L-amino acids
  SITE (93): Xaa equals any of the naturally occurring L-amino acids
  SITE (169): Xaa equals any of the naturally occurring L-amino acids
  SITE (237): Xaa equals any of the naturally occurring L-amino acids
  SITE (239): Xaa equals any of the naturally occurring L-amino acids
  SITE (240): Xaa equals any of the naturally occurring L-amino acids
  SITE (253): Xaa equals any of the naturally occurring L-amino acids
TVADVRRPFAQVNVLAEEVLIYRIVLNDIVGDVVQDHQVRLRRKDDAVIRQLEATMLVGRKHRHGDVLVRETTVSDARPEDRVHFRHVCXPQXKRVSLLDVVIAAHRLIHTKGTHKANYCRRHTVTRVRVDVVRTEARFKQLGRGITFPDSPLTRTEHTDRFRPFFFQXGFEFLFHHIEGLIPGDWGKFAFFVIFTVFHTQQRLRQTVFTVHDFGQEIALNAVQATVNRCVRVALTXQXXVPAAFRPERRNQXRRTTQFAI

SEQ ID NO: 1075 - protein, 61 aa, Homo sapiens
FYTNVTYKSDATTLRFPGRCDFSSAWEVDLHQPFQCSAHPGAGITAPHLLGEKPGRPEEVG

SEQ ID NO: 1076 - protein, 54 aa, Homo sapiens [sequence omitted]

SEQ ID NO: 1077 - protein, 5 aa, Homo sapiens
QYLLI

SEQ ID NO: 1078 - protein, 30 aa, Homo sapiens
  SITE (2): Xaa equals any of the naturally occurring L-amino acids
  SITE (13): Xaa equals any of the naturally occurring L-amino acids
  SITE (16): Xaa equals any of the naturally occurring L-amino acids
MXASQYILFFLQXLGXKLQFQGISSQQQVE

SEQ ID NO: 1079 - protein, 30 aa, Homo sapiens
MRASQYILFFLQFLGFKLQFQGISSQQQVE

SEQ ID NO: 1080 - protein, 7 aa, Homo sapiens
MFGCPFC

SEQ ID NO: 1081 - protein, 261 aa, Homo sapiens; identical to SEQ ID NO: 595

SEQ ID NO: 1082 - protein, 11 aa, Homo sapiens
FLLSLHLAALQ

SEQ ID NO: 1083 - protein, 41 aa, Homo sapiens [sequence omitted]

SEQ ID NO: 1084 - protein, 141 aa, Homo sapiens
GGERHLHRTHPRLPGHRFLRLHRAPRVPHVCGVRAHGAGVPHLVSGGDEVSPGGAGPVSHSAEEQPVHQVDRLCGACPGQRVFLCPGEPGAKSGRHLSGGVPPYTECDHAQPLARPGAVESCNHEVCAQTGETVQPLMARR

SEQ ID NO: 1085 - protein, 45 aa, Homo sapiens
MSMKCYLVVLICIPLMATDAECLFLCLRAMRISLEKGLSRSFAYF

SEQ ID NO: 1086 - protein, 136 aa, Homo sapiens
  SITE (1): Xaa equals any of the naturally occurring L-amino acids
  SITE (3): Xaa equals any of the naturally occurring L-amino acids
  SITE (8): Xaa equals any of the naturally occurring L-amino acids
  SITE (14): Xaa equals any of the naturally occurring L-amino acids
XYXSCRKXYLTYGXNSRVDPRVRHVCGVRAHGAGVPHLVSGGDEVSPGGAGPVSHSAEEQPVHQVDRLCGACPGQRVFLCPGEPGAKSGRHLSGGVPPYTECDHAQPLARPGAVESCNHEVCAQTGETVQPLMARR

SEQ ID NO: 1087 - protein, 45 aa, Homo sapiens; identical to SEQ ID NO: 1085

SEQ ID NO: 1088 - protein, 177 aa, Homo sapiens
  SITE (90): Xaa equals any of the naturally occurring L-amino acids
  SITE (173): Xaa equals any of the naturally occurring L-amino acids
LDIKVLQVPTRLRSPAGFTQWIQHWGSRWSCLPVPRCAPALLSPWVVDGTGRCGAGGGAPWGGSGRTGAHGGWGEGQAWRAAGPEPCPAXRQLRPSEKSSTAAAGPGAKALTAWGRPAALSGAPPSPRPPGTHSGPQALRAAPVPARPSPSAPPRKLRELAPALASPERGSYXAAAG

SEQ ID NO: 1089 - protein, 414 aa, Homo sapiens
  SITE (174): Xaa equals any of the naturally occurring L-amino acids
  SITE (410): Xaa equals any of the naturally occurring L-amino acids
MERAVRVESGVLVGVVCLLLACPATATGPEVAQPEVDTTLGRVRGRQVGVKGTDRLVNVFLGIPFAQPPLGPDRFSAPHPAQPWEGVRDASTAPPMCLQDVESMNSSRFVLNGKQQIFSVSEDCLVLNVYSPAEVPAGSGRPVMVWVHGGALITGAATSYDGSALAAYGDVVVXTVQYRLGVLGFFSTGDEHAPGNQGFLDVVAALRWVQENIAPFGGDLNCVTVFGGSAGGSIISGLVLSPVAAGLFHRAITQSGVITTPGIIDSHPWPLAQKIANTLACSSSSPAEMVQCLQQKEGEELVLSKKLKNTIYPLTVDGTVFPKSPKELLKEKPFHSVPFLMGVNNHEFSWLIPRGWGLLDTMEQMSREDMLAISTPVLTSLDVPPEMMPTVIDEYLGSNSDAQAKCQAFXGIHG

SEQ ID NO: 1090 - protein, 571 aa, Homo sapiens
MERAVRVESGVLVGVVCLLLACPATATGPEVAQPEVDTTLGRVRGRQVGVKGTDRLVNVFLGIPFAQPPLGPDRFSAPHPAQPWEGVRDASTAPPMCLQDVESMNSSRFVLNGKQQIFSVSEDCLVLNVYSPAEVPAGSGRPVMVWVHGGALITGAATSYDGSALAAYGDVVVVTVQYRLGVLGFFSTGDEHAPGNQGFLDVVAALRWVQENIAPFGGDLNCVTVFGGSAGGSIISGLVLSPVAAGLFHRAITQSGVITTPGIIDSHPWPLAQKIANTLACSSSSPAEMVQCLQQKEGEELVLSKKLKNTIYPLTVDGTVFPKSPKELLKEKPFHSVPFLMGVNNHEFSWLIPRGWGLLDTMEQMSREDMLAISTPVLTSLDVPPEMMPTVIDEYLGSNSDAQAKCQAFQEFMGDVFINVPTVSFSRYLRDSGSPVFFYEFQHRPSSFAKIKPAWVKADHGAEGAFVFGGPFLMDESSRLAFPEATEEEKQLSLTMMAQWTHFARTGDPNSKALPPWPQFNQAEQYLEINPVPRAGQKFREAWMQFWSETLPSKIQQWHQKQKNRKAQEDL

SEQ ID NO: 1091 - protein, 68 aa, Homo sapiens
  SITE (68): Xaa equals any of the naturally occurring L-amino acids
MISSLLSKAVLSLWISVFSWNVLGCKKLKTIILQCFKEASDLVLRERYLGVVQALSDDFSFCFTILSX

SEQ ID NO: 1092 - protein, 56 aa, Homo sapiens
VSKLFDLVRVALWESTFLSLSLSVPSVCAMFRSSEESKISSEFKIIFVFLLFNVME

SEQ ID NO: 1093 - protein, 66 aa, Homo sapiens [sequence omitted]

SEQ ID NO: 1094 - protein, 21 aa, Homo sapiens
  SITE (15): Xaa equals any of the naturally occurring L-amino acids
RWRGASTPHRDYLSXRYCACG

SEQ ID NO: 1095 - protein, 11 aa, Homo sapiens
WQILLIALLLI

SEQ ID NO: 1096 - protein, 38 aa, Homo sapiens
MLRWRLLATALIALCRRSASSVASGEPPDSPPCPWRRR

SEQ ID NO: 1097 - protein, 76 aa, Homo sapiens
  SITE (62): Xaa equals any of the naturally occurring L-amino acids
  SITE (70): Xaa equals any of the naturally occurring L-amino acids
  SITE (71): Xaa equals any of the naturally occurring L-amino acids
  SITE (74): Xaa equals any of the naturally occurring L-amino acids
MLHMYSQKDPLILCVRLAVLLAVTLTVPVVLFPIRRALQQLLFPGKAFSWPRHVAIALILLXLVNVLASXXQPXGI

SEQ ID NO: 1098 - protein, 54 aa, Homo sapiens
  SITE (26): Xaa equals any of the naturally occurring L-amino acids
  SITE (27): Xaa equals any of the naturally occurring L-amino acids
  SITE (36): Xaa equals any of the naturally occurring L-amino acids
  SITE (40): Xaa equals any of the naturally occurring L-amino acids
  SITE (44): Xaa equals any of the naturally occurring L-amino acids
  SITE (47): Xaa equals any of the naturally occurring L-amino acids
  SITE (49): Xaa equals any of the naturally occurring L-amino acids
MLHMYSQKDPLILCVPPGRAARGDPXXASRAGPYPXGPAXAAFXRQXLXLGTTW

SEQ ID NO: 1099 - protein, 148 aa, Homo sapiens
  SITE (2): Xaa equals any of the naturally occurring L-amino acids
  SITE (17): Xaa equals any of the naturally occurring L-amino acids
LXMYSQKDPLILCVRLXVLLAVTLTVPVVLFPIRRALQQLLFPGKAFSWPRHVAIALILLVLVNVLVICVPTIRDIFGVIGSTSAPSLIFILPSIFYLRIVPSEVEPFLSWPKIQALCFGVLGVLFMAVSLGFMFANWATGQSRMSGH

SEQ ID NO: 1100 - protein, 149 aa, Homo sapiens
MLHMYSQKDPLILCVRLAVLLAVTLTVPVVLFPIRRALQQLLFPGKAFSWPRHVAIALILLVLVNVLVICVPTIRDIFGVIGSTSAPSLIFILPSIFYLRIVPSEVEPFLSWPKIQALCFGVLGVLFMAVSLGFMFANWATGQSRMSGH

SEQ ID NO: 1101 - protein, 40 aa, Homo sapiens
MILRGVYSMVPIYTHMIFLFTFFLTISGKYFKIFEKHSRI

SEQ ID NO: 1102 - protein, 40 aa, Homo sapiens; identical to SEQ ID NO: 1101

SEQ ID NO: 1103 - protein, 56 aa, Homo sapiens
MNLWLGALIPVTVHLKRMWSHPKFQAQKTFPLSKSPKYHPVFLLVIIMARSSQLKR

SEQ ID NO: 1104 - protein, 106 aa, Homo sapiens
QGFIFWTQYNIGYISLRSIGFQHKSLPIRKSKWRKHQIIIIITQQKCGDWQWFWGFISSIRASASHFMKLLPSERTLNTPRSYCSFFLNGILKNWLKREEHSKYIL

SEQ ID NO: 1105 - protein, 56 aa, Homo sapiens; identical to SEQ ID NO: 1103

SEQ ID NO: 1106 - protein, 116 aa, Homo sapiens
  SITE (14): Xaa equals any of the naturally occurring L-amino acids
  SITE (25): Xaa equals any of the naturally occurring L-amino acids
  SITE (33): Xaa equals any of the naturally occurring L-amino acids
VGFQGLEGNPPPAXLNGLEGKGKLXKKAQGTGXKIIFWPKESKTPSGSPKPAKAANSKSKESDEPHHSKNERPARPPPPIMTDGEDADYTHFTNQQSSTRHFSKSESSHKGFHYKH

SEQ ID NO: 1107 - protein, 4 aa, Homo sapiens
VLRN

SEQ ID NO: 1108 - protein, 4 aa, Homo sapiens
VLRN

SEQ ID NO: 1109 - protein, 54 aa, Homo sapiens [sequence omitted]

SEQ ID NO: 1110 - protein, 5 aa, Homo sapiens
TTMTG

SEQ ID NO: 1111 - protein, 40 aa, Homo sapiens
MPTTVGAQIFIFIFLLCTLFFLPFYGCLKSREKGRLVNDE

SEQ ID NO: 1112 - protein, 40 aa, Homo sapiens; identical to SEQ ID NO: 1111

SEQ ID NO: 1113 - protein, 101 aa, Homo sapiens [sequence omitted]

SEQ ID NO: 1114 - protein, 216 aa, Homo sapiens
  SITE (86): Xaa equals any of the naturally occurring L-amino acids
MKERKGFNLQGPLILWSFCLAIFSILGAVRMWGIMGTVLLTGGLKQTVCFINFIDNSTVKFWSWVFLLSKVIELGDTAFIILRKRXLIFIHWYHHSTVLVYTSFGYKNKVPAGGWFVTMNFGVHAIMYTYYTLKAANVKPPKMLPMLITSLQILQMFVGAIVSILTYIWRQDQGCHTTMEHLFWSFILYMTYFILFAHFFCQTYIRPKVKAKTKSQ

SEQ ID NO: 1115 - protein, 216 aa, Homo sapiens
MKERKGFNLQGPLILWSFCLAIFSILGAVRMWGIMGTVLLTGGLKQTVCFINFIDNSTVKFWSWVFLLSKVIELGDTAFIILRKRPLIFIHWYHHSTVLVYTSFGYKNKVPAGGWFVTMNFGVHAIMYTYYTLKAANVKPPKMLPMLITSLQILQMFVGAIVSILTYIWRQDQGCHTTMEHLFWSFILYMTYFILFAHFFCQTYIRPKVKAKTKSQ

SEQ ID NO: 1116 - protein, 16 aa, Homo sapiens
VLGLGVVLTPIIPVLW

SEQ ID NO: 1117 - protein, 55 aa, Homo sapiens
  SITE (30): Xaa equals any of the naturally occurring L-amino acids
NNLCFISPFTSMYWLAQFIVSEKQGTHLHXLQETVLPFNLKTRKLNFNRNLLSML

SEQ ID NO: 1118 - protein, 32 aa, Homo sapiens
MHMWILSLHFIFTPRLVLCEVRPNKIVEDTII

SEQ ID NO: 1119 - protein, 1 aa, Homo sapiens
A

SEQ ID NO: 1120 - protein, 51 aa, Homo sapiens
  SITE (20): Xaa equals any of the naturally occurring L-amino acids
  SITE (38): Xaa equals any of the naturally occurring L-amino acids
MELLQAKKLLLLLGLFVSCXSNIRKTEPCFGLDSITFXDPKKKCLSNLKSC

SEQ ID NO: 1121 - protein, 51 aa, Homo sapiens
MELLQAKKLLLLLGLFVSCCSNIRKTEPCFGLDSITFRDPKKKCLCNLKSC

SEQ ID NO: 1122 - protein, 2 aa, Homo sapiens
YF

SEQ ID NO: 1123 - protein, 88 aa, Homo sapiens
LTTPYGGLCKQSTRGSIISTWQCTWWLCDLEKVSYSCLCVLTLETETLFVVFTLFQQQKLFQGKSYRTFKHVCIHTYPIPHYIKVILL

SEQ ID NO: 1124 - protein, 82 aa, Homo sapiens
MNLGWYQMHPLKMIWLTIFLTWLMRQASPTGHDLEVKVFCCYCGLKYLVMGEECRVVALAQTQENPFSPLFYFCYSDHLSPF

SEQ ID NO: 1125 - protein, 82 aa, Homo sapiens; identical to SEQ ID NO: 1124

SEQ ID NO: 1126 - protein, 84 aa, Homo sapiens
  SITE (17): Xaa equals any of the naturally occurring L-amino acids
MGTFSLMLLLLPSVVCXSFKVRPLFCRAAVVCSGSTSDPIHLGPSHTWRCHQWRLQNSKDGCLLLPPGSPSQRETDLMLAGMLL

SEQ ID NO: 1127 - protein, 25 aa, Homo sapiens
GLFALSFLFLLVVMLGCQFDIFLAF

SEQ ID NO: 1128 - protein, 84 aa, Homo sapiens
MGTFSLMLLLLPSVVCFSFKVRPLFCRAAVVCSGSTSDPIHLGPSHTWRCHQWRLQNSKDGCLLLPPGSPSQRETDLMLAGMLL

SEQ ID NO: 1129 - protein, 219 aa, Homo sapiens [sequence omitted]

SEQ ID NO: 1130 - protein, 219 aa, Homo sapiens
  SITE (104): Xaa equals any of the naturally occurring L-amino acids
  SITE (197): Xaa equals any of the naturally occurring L-amino acids
MEMASKMKDTGFIVFAVLLLVSCLILIFVIAPRYGQRNILIYIIICSVIGAFSVAAVKGLGITIKNFFQGLPVVRHPLPYILSLILALSLSTQVNFLNRALDIXNTSLVFPIYYVFFTTVVVTSSIILFKEWYSMSAVDIAGTLSGFVTIILGVFMLHAFKDLDISCASLPHMHKNPPPSPAPEPTVIRLEDKNVLXDNIELASTSSPEEKPKVFIIHS

SEQ ID NO: 1131 - protein, 217 aa, Homo sapiens
MASKMKDTGFIVFAVLLLVSCLILIFVIAPRYGQRNILIYIIICSVIGAFSVAAVKGLGITIKNFFQGLPVVRHPLPYILSLILALSLSTQVNFLNRALDIFNTSLVFPIYYVFFTTVVVTSSIILFKEWYSMSAVDIAGTLSGFVTIILGVFMLHAFKDLDISCASLPHMHKNPPPSPAPEPTVIRLEDKNVLVDNIELASTSSPEEKPKVFIIHS

SEQ ID NO: 1132 - protein, 253 aa, Homo sapiens
  SITE (215): Xaa equals any of the naturally occurring L-amino acids
  SITE (252): Xaa equals any of the naturally occurring L-amino acids
  SITE (253): Xaa equals any of the naturally occurring L-amino acids
MQACVLLLGLVLSAQLQSPENMRMGGGRVLLRAHPVPAGGGQCQSSAKGPWVGTGPEREERDSPEGRWASYWAQSWEGVAASTGWAWTPLAPTPSGCGCSLSLESRTGPGCLGGCQVPPELPRAPTCKCQPQGSAQMRPSQLQPAMPWDAHREGGGFGLLSPWERLGAVTARLAQAHCRVGWLPQPGLGGTPGSGPPCLESQWGDGEETWPPMAXGQLRTRTCWSWKCCGVEGWGGQLLTPASCLLLSTFPXX

SEQ ID NO: 1133 - protein, 102 aa, Homo sapiens
NSEKGQKKQRGPRWICQLFCRCFLPLLWVVCSPLQTSARREGLNLPAPQDLLPSGPSPALRSLPDRRVDRATWAARETHGGPPCGQPCQLPPSPELHLHLEE

SEQ ID NO: 1134 - protein, 137 aa, Homo sapiens
MQACVLLLGLVLSAQLQSPENMRMGGGRVLLRAHPVPAGGGQCQSSAKGPWVGTGPEREERDSPEGRWASYWAQSWEGVAASTGWAWTPLAPTPSGCGCSPKPGEQDRPGVSGRLPGASQSSQGPPPASASLRAVPK

SEQ ID NO: 1135 - protein, 93 aa, Homo sapiens
  SITE (34): Xaa equals any of the naturally occurring L-amino acids
  SITE (76): Xaa equals any of the naturally occurring L-amino acids
MYALYITVHGYFLITFLFGMVVLALVVWKIFTLXRATAVKERGKNRKKVLTLLGLSSLVGVTWGLAIFTPLGLSTXYIFALFNSLQAQRGITV

SEQ ID NO: 1136 - protein, 93 aa, Homo sapiens
MYALYITVHGYFLITFLFGMVVLALVVWKIFTLSRATAVKERGKNRKKVLTLLGLSSLVGVTWGLAIFTPLGLSTVYIFALFNSLQAQRGITV

SEQ ID NO: 1137 - protein, 122 aa, Homo sapiens [sequence omitted]

SEQ ID NO: 1138 - protein, 241 aa, Homo sapiens
APGQTPSLCSWLLPLPSTWATTGHVCFSDILQTPDGGQLLLDWAKQPDSSQDPDPTTQPIVLLLPGITGSSQETYVLHLVNQALRDGYQAVVFNNRGCRGEELRTHRAFCASNTEDLETVVNHIKHRYPQAPLLAVGISFGGILVLNHLAQARQAAGLVAALTLSACWDSFETTRSLETPLNSLLFNQPLTAGLCQLVERLSYGKTCRPVQSASLMSATHLWPLDIKTVLPTTKQQALEPR

SEQ ID NO: 1139 - protein, 242 aa, Homo sapiens
MAPGQTPSLCSWLLPLPSTWATTGHVCFSDILQTPDGGQLLLDWAKQPDSSQDPDPTTQPIVLLLPGITGSSQETYVLHLVNQALRDGYQAVVFNNRGCRGEELRTHRAFCASNTEDLETVVNHIKHRYPQAPLLAVGISFGGILVLNHLAQARQAAGLVAALTLSACWDSFETTRSLETPLNSLLFNQPLTAGLCQLVERLSYGKTCRPVQSASLMSATHLWPLDIKTVLPTTKQQALEPR

SEQ ID NO: 1140 - protein, 180 aa, Homo sapiens
  SITE (143): Xaa equals any of the naturally occurring L-amino acids
MGWPRPGRALVAVKALLVLSLLQVPAQAVVRAVLEDNSSSVDFADLPALFGVPLAPEGIRGYLMEVKPANACHPIEAPRLGNRSLGAIVLIRRYDCTFDLKVLNAQRAGFEAAIVHNVHSDDLVSMTHVYEDLRGQIAIPSVXVSEAARRTCGSSWAATSRPTRCPADDPPCHDLAVTPC

SEQ ID NO: 1141 - protein, 225 aa, Homo sapiens
  SITE (21): Xaa equals any of the naturally occurring L-amino acids
  SITE (45): Xaa equals any of the naturally occurring L-amino acids
TQPCQRPGIVTPVLTVSWVLXCTLALVVSAFFVLNHLWLWAQACXSHRRPVKTSTCQKAQVRTFTWHNDLCAICLDEYEEGDQLKILPCSHTYHCKCIDPWFSQAPRRSCPVCKQSVAATEDSFDSTTYSFRDEDPSLPGHRPPIWAIQVQYAPGGWSCWAAPVPTATAAPRPWRQSIPLSPQPLLRPLVSKDLGQGGGCNEECFWSEKNKVGLKAEKKKKKKTR

SEQ ID NO: 1142 - protein, 359 aa, Homo sapiens [sequence omitted]

SEQ ID NO: 1143 - protein, 133 aa, Homo sapiens
MWHTKPLGSGSCVPLLPLLLLLLLLFPLLPWPPPLPPPPPSSLHPFAPAFPATGSLSSNNSQLLAPLRLQNALHLFKCFPVLFPLHKIISFHPEYPWQAPIFQYFYLSIPSSSLHPEHLGHSFVSTLHSPTRQ

SEQ ID NO: 1144 - protein, 86 aa, Homo sapiens
  SITE (72): Xaa equals any of the naturally occurring L-amino acids
PCCFHKPHASHIMNFLIRIQCIYLPKIVCAYSKYEQFLNNGSIIFVQNAKNWGQAWWHTPVIPALWEAKVGXSPEVRSLRPAWPAW

SEQ ID NO: 1145 - protein, 133 aa, Homo sapiens; identical to SEQ ID NO: 1143

SEQ ID NO: 1146 - protein, 99 aa, Homo sapiens
  SITE (91): Xaa equals any of the naturally occurring L-amino acids
MAALLLLPLLLLLPLLLLKLHLWPQLRWLPADLAFAVRALCCKRALRARALAAAAADPEGPEGGCSLAWRLAELAQQRAELLLRSRALATXRRSARVTG

SEQ ID NO: 1147 - protein, 455 aa, Homo sapiens
MAALLLLPLLLLLPLLLLKLHLWPQLRWLPADLAFAVRALCCKRALRARALAAAAADPEGPEGPCILAWRLAELAQQRARNFLLRSRALATQRRSARVTGLTRLPTCARLGLGTRRRRQRRGERWRRRAGSAGSRRCSGRKRRGVCRRGRCRQRWRSRAPLSPGATVALLLPAGPEFLWLWIGLAKAGLRTAFVPTALRRGPLLHCLRSCGARALVLAPEFLESLEPDLPALRAMGLHLWAAGPGTHPAGISDLLAEVSAEVDGPVPGYLSSPQSITDTCLYIFTSGTTGLPKAARISHLKILQCQGFYQLCGVHQEDVIYLALPLYHMSGSLLGIVGCMGIGATVVLKSKFSAGQFWEDCQQHRVTVFQYIGELCRYLVNQPPSKAERGHKVRLAVGSGLRPDTWERFVRRFGPLQVLETYGLTEGNVPPSTTQDSGALWGVLPGFTSISSPSP

SEQ ID NO: 1148 - protein, 153 aa, Homo sapiens
  SITE (77): Xaa equals any of the naturally occurring L-amino acids
  SITE (82): Xaa equals any of the naturally occurring L-amino acids
  SITE (83): Xaa equals any of the naturally occurring L-amino acids
  SITE (86): Xaa equals any of the naturally occurring L-amino acids
  SITE (91): Xaa equals any of the naturally occurring L-amino acids
  SITE (122): Xaa equals any of the naturally occurring L-amino acids
  SITE (124): Xaa equals any of the naturally occurring L-amino acids
MMLIPMASVMAVTEPKWVSVWSRFLWVTLLSMVLGSLLALLLPLGAVEEQCLAVLKGLYLLRSKPDRAQHAAPSAPXRPRSXXSPXGARRXLVAKTKAFSSGVKFGKAQELALEPRPWKIKXAXGQSRGKKAQKSSFNAPPFKEWDPGNFPGD

SEQ ID NO: 1149 - protein, 361 aa, Homo sapiens
  SITE (2): Xaa equals any of the naturally occurring L-amino acids
  SITE (4): Xaa equals any of the naturally occurring L-amino acids
  SITE (19): Xaa equals any of the naturally occurring L-amino acids
AXPXGKLEARAALNQALEXKRQGKREKAQKLFMHALKMDPDFVDALTEFGIFSEEDKDIIQADYLYTRALTISPYHEKALVNRDRTLPLVEEIDQRYFSIIDSKVKKVMSIPKGNSALRRVMEETYYHHIYHTVAIEGNTLTLSEIRHILETRYAVPGKSLEEQNEVIGMHAAMKYINTTLVSRIGSVTISDVLEIHRRVLGYVDPVEAGRFRTTQVLVGHHIPPHPQDVEKQMQEFVQWLNSEEAMNLHPVEFAALAHYKLVYIHPFIDGNGRTSRLLMNLILMQAGYPPITIRKEQRSDYYHVLEAANEGDVRPFIRFIAKCTETTLDTLLFATTEYSVALPEAQPNHSGFKETLPVKP

SEQ ID NO: 1150 - protein, 458 aa, Homo sapiens
MMLIPMASVMAVTEPKWVSVWSRFLWVTLLSMVLGSLLALLLPLGAVEEQCLAVLKGLYLLRSKPDRAQHAATKCTSPSTELSITSRGATLLVAKTKASPAGKLEARAALNQALEMKRQGKREKAQKLFMHALKMDPDFVDALTEFGIFSEEDKDIIQADYLYTRALTISPYHEKALVNRDRTLPLVEEIDQRYFSIIDSKVKKVMSIPKGNSALRRVMEETYYHHIYHTVAIEGNTLTLSEIRHILETRYAVPGKSLEEQNEVIGMHAAMKYINTTLVSRIGSVTISDVLEIHRRVLGYVDPVEAGRFRTTQVLVGHHIPPHPQDVEKQMQEFVQWLNSEEAMNLHPVEFAALAHYKLVYIHPFIDGNGRTSRLLMNLILMQAGYPPITIRKEQRSDYYHVLEAANEGDVRPFIRFIAKCTETTLDTLLFATTEYSVALPEAQPNHSGFKETLPVKP

SEQ ID NO: 1151 - protein, 125 aa, Homo sapiens
  SITE (46): Xaa equals any of the naturally occurring L-amino acids
AQRNPGAVPAVWRQAGVTFTSAKGRSSPYWSLHPQIILLRKLSSSXQKPRSSSAQCGRNAAAGLPHCLRASWSRLLKIEWQVGLAWAGADVLCGHPVPKRPPTLGPQTSGADWHLRGHSPTHLLQ

SEQ ID NO: 1152 - protein, 17 aa, Homo sapiens
MLSGSLGSAVCMSSQPR

SEQ ID NO: 1153 - protein, 17 aa, Homo sapiens
MLSGSLGSAVCMSSQPR

SEQ ID NO: 1154 - protein, 254 aa, Homo sapiens
  SITE (218): Xaa equals any of the naturally occurring L-amino acids
  SITE (228): Xaa equals any of the naturally occurring L-amino acids
  SITE (240): Xaa equals any of the naturally occurring L-amino acids
ETRLHHVSTLAAFTVRQVQQHQGNLDASGPARDLVDAFLLKMAQEEQNPGTEFTNKNMLMTVIYLLFAGTMTVSTTVGYTLLLLMKYPHVQKWVREELNRELGAGQAPSLGDRTRSLTPTRFCMRRSGCWRWCPWEYPAPSCGPPASEGTPCPRARRSSPSLAPSCMTPTSSSTQKSSTQTVSWMQMDGSGSMRRSCLLLKEACLPWKGPGKSGALPXLHHHPTSLLXGEPVPAGHPEPXAHRQWPFQHSPSLP

SEQ ID NO: 1155 - protein, 302 aa, Homo sapiens
MEATGTWALLLALALLLLLTLALSGTRARGHLPPGPTPLPLLGNLLQLRPGALYSGLMRLSKKYGPVFTIYLGPWRPVVVLVGQEAVREALGGQAEEFSGRGTVAMLEGTFDGHGVFFSNGERWRQLRKFTMLALRDLGMGKREGEELIQAEARCLVETFQGTEGRPFDPSLLLAQATSNVVCSLLFGLRFSYEDKEFQAVVRAAGGTLLGVSSQGGQVSGWDPSPTTFPEGSCQGPMRTSCPSPHRPTRCSPGSCGPCQAPTSSSSTTSAPWLPSQSGRCSSTRGTWMLRAPHVTLSMPSC

SEQ ID NO: 1156 - protein, 302 aa, Homo sapiens; identical to SEQ ID NO: 1155

SEQ ID NO: 1157 - protein, 240 aa, Homo sapiens
MTAPVPAPRILLPLLLLLLLTPPPGARGEVCMASRGLSLFPESCPDFCCGTCDDQYCCSDVLKKFVWSEERCAVPEASVPASVEPVEQLGSALRFRPGYNDPMSGFGATLAVGLTIFVLSVVTIIICFTCSCCCLYKTCRRPRPVVTTTTSTTVVHAPYPQPPSVPPSYPGPSYQGYHTMPPQPGMPAAPYPMQYPPPYPAQPMGPPAYHETLAGGAAAPYPASQPPYNPAYMDAPKAAL

SEQ ID NO: 1158 - protein, 240 aa, Homo sapiens; identical to SEQ ID NO: 1157

SEQ ID NO: 1159 - protein, 116 aa, Homo sapiens
MKGLRSLAATTLALFLVFVFLGNSSCAPQRLLERRNWTPQAMLYLKGAQGRRFISDQSRRKDLSDRPLPERRSPNPQLLTIPEAATILLASLQKSPEDEEKNFDQTRFLEDSLLNW

SEQ ID NO: 1160 - protein, 116 aa, Homo sapiens; identical to SEQ ID NO: 1159

SEQ ID NO: 1161 - protein, 426 aa, Homo sapiens
VVPFSGMLPPGAEKAVASFVTQLAAAEALQKAPDVTTLPRNVMFVFFQGETFDYIGSSRMVYDMEKGKFPVQLENVDSFVELGQVALRTSLELWMHTDPVSQKNESVRNQVEDLLATLEKSGAGVPAVILRRPNQSQPLPPSSLQRFLRARNISGVVLADHSGAFHNKYYQSIYDTAENINVSYPEWLSPEEDLNFVTDTAKALADVATVLGRALYELAGGTNFSDTVQADPQTVTRLLYGFLIKANNSWFQSILRQDLRSYLGDGPLQHYIAVSSPTNTTYVVQYALANLTGTVVNLTREQCQDPSKVPSENKDLYEYSWVQGPLHSNETDRLPRCVRSTARLARALSPAFELSQWSSTEYSTWTESRWKDIRARIFLIASKELELITLTVGFGILIFSLIVTYCINAKADVLFIAPREPGAVSY

SEQ ID NO: 1162 - protein, 417 aa, Homo sapiens
MATAGGGSGADPGSRGLLRLLSFCVLLAGLCRGNSVERKIYIPLNKTAPCVRLLNATHQIGCQSSISGDTGVIHVVEKEEDLQWVLTDGPNPPYMVLLESKHFTRDLMEKLKGRTSRIAGLAVSLTKPSPASGFSPSVQCPNDGFGVYSNSYGPEFAHCREIQWNSLGNGLAYEDFSFPIFLLEDENETKVIKQCYQDHNLSQNGSAPTFPLCAMQLFSHMHAVISTATCMRRSSIQSTFSINPEIVCDPLSDYNVWSMLKPINTTGTLKPDDRVVVAATRLDSRSFFWNVAPGAESAVASFVTQLAAAEALQKAPDVTTLPRNVMFVFFQGETFDYIGSSRMVYDMEKGKFPVQLENVDSFVELGQVALRTSLELWMHTDPVSQKNESVRNQVEDLLATLETVSYAHLNLQGGEVL

SEQ ID NO: 1163 - protein, 709 aa, Homo sapiens
  SITE (216): Xaa equals any of the naturally occurring L-amino acids
MATAGGGSGADPGSRGLLRLLSFCVLLAGLCRGNSVERKIYIPLNKTAPCVRLLNATHQIGCQSSISGDTGVIHVVEKEEDLQWVLTDGPNPPYMVLLESKHFTRDLMEKLKGRTSRIAGLAVSLTKPSPASGFSPSVQCPNDGFGVYSNSYGPEFAHCREIQWNSLGNGLAYEDFSFPIFLLEDENETKVIKQCYQDHNLSQNGSAPSFPLCAMXLFSHMHAVISTATCMRRSSIQSTFSINPEIVCDPLSDYNVWSMLKPINTTGTLKPDDRVVVAATRLDSRSFFWNVAPGAESAVASFVTQLAAAEALQKAPDVTTLPRNVMFVFFQGETFDYIGSSRMVYDMEKGKFPVQLENVDSFVELGQVALRTSLELWMHTDPVSQKNESVRNQVEDLLATLEKSGAGVPAVILRRPNQSQPLPPSSLQRFLRARNISGVVLADHSGAFHNKYYQSIYDTAENINVSYPEWLSPEEDLNFVTDTAKALADVATVLGRALYELAGGTNFSDTVQADPQTVTRLLYGFLIKANNSWFQSILRQDLRSYLGDGPLQHYIAVSSPTNTTYVVQYALANLTGTVVNLTREQCQDPSKVPSENKDLYEYSWVQGPLHSNETDRLPRCVRSTARLARALSPAFELSQWSSTEYSTWTESRWKDIRARIFLIASKELELITLTVGFGILIFSLIVTYCINAKADVLFIAPREPGAVSY

SEQ ID NO: 1164 - protein, 230 aa, Homo sapiens
MTGLYELVWRVLHALLCLHRTLTSWLRVRFGTWNWIWRRCCRAASAAVLAPLGFTLRKPPAVGRNRRHHRHPRGGSCLAAAHHRMRWRADGRSLEKLPVHMGLVITEVEQEPSFSDIASLVVWCMAVGISYISVYDHQGIFKRNNSRLMDEILKQQQELLGLDCSKYSPEFANSNDKDDQVLNCHLAVKVLSAGRWKSRYCKSCSGLLPVSSPEAKETHRFGCRYVSQFT

SEQ ID NO: 1165 - protein, 293 aa, Homo sapiens
MTGLYELVWRVLHALLCLHRTLTSWLRVRFGTWNWIWRRCCRAASAAVLAPLGFTLRKPPAVGRNRRHHRHPRGGSCLAAAHHRMRWRADGRSLEKLPVHMGLVITEVEQEPSFSDIASLVVWCMAVGISYISVYDHQGIFKRNNSRLMDEILKQQQELLGLDCSKYSPEFANSNDKDDQVLNCHLAVKVLSPEDGKADIVRAAQDFCQLVAQKQKRPTDLDVDTLASLLSSNGCPDPDLVLKFGPVDSTLGFLPWHIRLTEIVSLPSHLNISYEDFFSALRQYAACEQRLGK

SEQ ID NO: 1166 - protein, 173 aa, Homo sapiens
  SITE (85): Xaa equals any of the naturally occurring L-amino acids
  SITE (128): Xaa equals any of the naturally occurring L-amino acids
  SITE (146): Xaa equals any of the naturally occurring L-amino acids
  SITE (160): Xaa equals any of the naturally occurring L-amino acids
  SITE (168): Xaa equals any of the naturally occurring L-amino acids
  SITE (172): Xaa equals any of the naturally occurring L-amino acids
MVEEPGRFLPLWLHILLITVLLVLSGIFSGLNLGLMALDPMELRIVQNCGTEKERRYARKIEPIRRKGNYLLCSLLLGNVLVNTXLTILLDNLIGSGLMAVASSTIGIVIFGEILPQALCSRHGLAVXANTILLTKFFMLLTFPLXFPISKLLDFFLGQXIRTVYNRXKLMXM

SEQ ID NO: 1167 - protein, 173 aa, Homo sapiens
  SITE (146): Xaa equals any of the naturally occurring L-amino acids
  SITE (160): Xaa equals any of the naturally occurring L-amino acids
  SITE (168): Xaa equals any of the naturally occurring L-amino acids
  SITE (172): Xaa equals any of the naturally occurring L-amino acids
MVEEPGRFLPLWLHILLITVLLVLSGIFSGLNLGLMALDPMELRIVQNCGTEKERRYARKIEPIRRKGNYLLCSLLLGNVLVNTSLTILLDNLIGSGLMAVASSTIGIVIFGEILPQALCSRHGLAVGANTILLTKFFMLLTFPLXFPISKLLDFFLGQXIRTVYNRXKLMXM

SEQ ID NO: 1168 - protein, 314 aa, Homo sapiens
  SITE (93): Xaa equals any of the naturally occurring L-amino acids
EKAAGAGKSHLAIVQKVNNEGEGDPFYEVLGLVTLEDVIEEIIKSEILDESDMYTDNRSRKRVSEKNKRDFSAFKDADNELKVKISPQLLLAXHRFLATEVSQFSPSLISEKILLRLLKYPDVIQELKFDEHNKYYARHYLYTRNKPADYFILILQGKVEVEAGKENMKFETGAFSYYGTMALTSVPSDRSPAHPTPLSRSASLSYPDRTDVSTAATLAGSSNQFGSSVLGQYISDFSVRALVDLQYIKITRQQYQNGLLASRMENSPQFPIDGCTTHMENLAEKSELPVVDETTTLLNERNSLLHKASHENAI

SEQ ID NO: 1169 - protein, 604 aa, Homo sapiens
MVEEPGRFLPLWLHILLITVLLVLSGIFSGLNLGLMALDPMELRIVQNCGTEKERRYARKIEPIRRKGNYLLCSLLLGNVLVNTSLTILLDNLIGSGLMAVASSTIGIVIFGEILPQALCSRHGLAVGANTILLTKFFMLLTFPLSFPISKLLDFFLGQEIRTVYNREKLMEMLKVTEPYNDLVKEELNMIQGALELRTKTVEDIMTQLQDCFMIRSDAILDFNTMSEIMESGYTRIPVFEDEQSNIVDILYVKDLAFVDPDDCTPLKTITRFYNHPVHFVFHDTKLDAMLEEFKKGKSHLAIVQKVNNEGEGDPFYEVLGLVTLEDVIEEIIKSEILDESDMYTDNRSRKRVSEKNKRDFSAFKDADNELKVKISPQLLLAAHRFLATEVSQFSPSLISEKILLRLLKYPDVIQELKFDEHNKYYARHYLYTRNKPADYFILILQGKVEVEAGKENMKFETGAFSYYGTMALTSVPSDRSPAHPTPLSRSASLSYPDRTDVSTAATLAGSSNQFGSSVLGQYISDFSVRALVDLQYIKITRQQYQNGLLASRMENSPQFPIDGCTTHMENLAEKSELPVVDETTTLLNERNSLLHKASHENAI

SEQ ID NO: 1170 - protein, 189 aa, Homo sapiens
  SITE (169): Xaa equals any of the naturally occurring L-amino acids
  SITE (172): Xaa equals any of the naturally occurring L-amino acids
  SITE (180): Xaa equals any of the naturally occurring L-amino acids
MAAASAGATRLLLLLLMAVAAPSRARGSGCRAGTGARGAGAEGREGEACGTVGLLLEHSFEIDDSANFRKRGSLLWNQQDGTLSLSQRQLSEEERGRLRDVAALNGLYRVRIPRRPGALDGLEAGGYVSSFVPACSLVESHLSDQLTLHVDVAGNVVGVSVVTHPMAPXSPXGFPLPWSXAEILATIQF

SEQ ID NO: 1171 - protein, 117 aa, Homo sapiens
AASAGATRLLLLLLMAVAAPSRARGSGCRAGTGARGAGAEGREGEACGTVGLLLEHSFEILATMPVLTSHPPTPSPCSLGTCRLLSSLCAFVPGGLTLLSLAGLGGPVQAPAAPPSL

SEQ ID NO: 1172 - protein, 241 aa, Homo sapiens
MAAASAGATRLLLLLLMAVAAPSRARGSGCRAGTGARGAGAEGREGEACGTVGLLLEHSFEIDDSANFRKRGSLLWNQQDGTLSLSQRQLSEEERGRLRDVAALNGLYRVRIPRRPGALDGLEAGGYVSSFVPACSLVESHLSDQLTLHVDVAGNVVGVSVVTHPMAPCSPRGFPPAHGVEPEILATMPVLTSHPPTPSPCSLGTCRLLSSLCAFVPGGLTLLSLAGLGGPVQAPAAPPSL

SEQ ID NO: 1173 - protein, 265 aa, Homo sapiens
  SITE (215): Xaa equals any of the naturally occurring L-amino acids
MFLLFLLTCELAAEVAAEVEKSSDGPGAAQEPTWLTDVPAAMEFIAATEVAVIGFFQDLEIPAVPILHSMVQKFPGVSFGISTDSEVLTHYNITGNTICLFRLVDNEQLNLEDEDIESIDATKLSRFIEINSLHMVTEYNPVTVIGLFNSVIQIHLLLIMNKASPEYEENMHRYQKAAKLFQGKILFILVDSGMKENGKVISFFKLKESQLPALXIYQTLDDEWDTLPTAEVSVEHVQNFCDGFLSGKLLKENRESEGKTPKVEL

SEQ ID NO: 1174 - protein, 265 aa, Homo sapiens
MFLLFLLTCELAAEVAAEVEKSSDGPGAAQEPTWLTDVPAAMEFIAATEVAVIGFFQDLEIPAVPILHSMVQKFPGVSFGISTDSEVLTHYNITGNTICLFRLVDNEQLNLEDEDIESIDATKLSRFIEINSLHMVTEYNPVTVIGLFNSVIQIHLLLIMNKASPEYEENMHRYQKAAKLFQGKILFILVDSGMKENGKVISFFKLKESQLPALAIYQTLDDEWDTLPTAEVSVEHVQNFCDGFLSGKLLKENRESEGKTPKVEL

SEQ ID NO: 1175 - protein, 158 aa, Homo sapiens [sequence omitted]

SEQ ID NO: 1176 - protein, 291 aa, Homo sapiens
MSQEGVELEKSVRRLREKFHGKVSSKKAGALMRKFGSDHTGVGRSIVYGVKQKDGQELSNDLDAQDPPEDMKQDRDIQAVATSLLPLTEANLRMFQRAQDDLIPAVDRQFACSSCDHVWWRRVPQRKEVSRCRKCRKRYEPVPADKMWGLAEFHCPKCRHNFRGWAQMGSPSPCYGCGFPVYPTRILPPRWDRDPDRRSTHTHSCSAADCYNRREPHVPGTSCAHPKSRKQNHLPKVLHPSNPHISSGSTVATCLSQGGLLEDLDNLILEDLKEEEEEEEEVEDEEGGPRE

SEQ ID NO: 1177 - protein, 125 aa, Homo sapiens [sequence omitted]

SEQ ID NO: 1178 - protein, 6 aa, Homo sapiens
  SITE (4): Xaa equals any of the naturally occurring L-amino acids
GTQXAL

SEQ ID NO: 1179 - protein, 125 aa, Homo sapiens [sequence omitted]

SEQ ID NO: 1180 - protein, 132 aa, Homo sapiens
  SITE (104): Xaa equals any of the naturally occurring L-amino acids
  SITE (120): Xaa equals any of the naturally occurring L-amino acids
MPDVQGPWHPAHPPIPSAALCLLWPHCLAAPKYARPRCLLVFVLCDRSAWNILLYSVGSKVSGLCSNCSLVPGVVAHTCNPKVPLGLQGCELPCPAEHLIFSKXLSSCATWAHCFLGLSXCWCLHPHPHPSW

SEQ ID NO: 1181 - protein, 92 aa, Homo sapiens
SGLAWALLLSLPGGLRSSSARLPPEPFHGQGLSSVGAIRRRVCRSVRLGDPWGMEGTTRPFPSVPCQAVLTAASSQGRKPGQRQRLLVPSIP

SEQ ID NO: 1182 - protein, 139 aa, Homo sapiens
TFRLVSAHLKTRKLINPEAAERRWRDWDSRQGWLSVKMQRVSGLLSWTLSRVLWLSGLSEPGAARQPRIMEEKALEVYDLIRTIRDPEKPNTLEELEVVSESCVEVQEINEEEYLVIIRFTPTVPHCSLATLIVGNLHF

SEQ ID NO: 1183 - protein, 143 aa, Homo sapiens
MPDVQGPWHPAHPPIPSAALCLLWPHCLAAPKYARPRCLLVFVLCDRSAWNILLYSVGSKVSGLCSNCSLVPGVVAHTCNPKVPLGLQGCELPCPAEHLIFSKCLSSCATWAHCFLGLSCCWCLHPHPHPSWPAPFLSRWAHV

SEQ ID NO: 1184 - protein, 13 aa, Homo sapiens
MGQGACKNMSVGS

SEQ ID NO: 1185 - protein, 102 aa, Homo sapiens; identical to SEQ ID NO: 1133

SEQ ID NO: 1186 - protein, 259 aa, Homo sapiens
  SITE (62): Xaa equals any of the naturally occurring L-amino acids
AGAWVSLGPCLFPAPADSEQRPWVRRVGVGPLPAEPGQGELQESPLCPCSWNVPQRPHLKGXCAGGVAQSHTASTLSSGTGDSGCSGKGLLDVTYNSVRLETDAGGGRAGPPGITDHRKMGGGSRGPAPTPSCLTLLSCPHPCAFVPETRVATQAGPGSSLILPLPSEPCSSLPSPLPPLPRRVTSDRAPLAIQGGSRGLDRRARRLPAVAGASCPCRVGELSGREPYLPSAKTVKVYRLFTDFYLNCKSADFVNVLGV

SEQ ID NO: 1187 - protein, 119 aa, Homo sapiens
MGQGACQKYVCWFLNVVCPCPPGSGRVHVSPHTCAREGASWRGDSRARGLHLWLPLASLGGPGLPGSQALSCGTWHLADQLAGRKIGGHRAGGQCPLPVSIRSTCHCMQPVGTFLAVRN

SEQ ID NO: 1188 - protein, 177 aa, Homo sapiens
MRGSVECTWGWGHCAPSPLLLWTLLLFAAPFGLLGEKTRQVSLEVIPNWLGPLQNLLHIRAVGTNSTLHYVWSSLGPLAVVMVATNTPHSTLSVNWSLLLSPEPDGGLMVLPKDSIQFSSALVFTRLLEFDSTNVSDTAAKPLGRPYPPYSLADFSWNNITDSLDPATLSATFQGTP

SEQ ID NO: 1189 - protein, 330 aa, Homo sapiens
RPTRPLNCGRMRGSVECTWGWGHCAPSPLLLWTLLLFAAPFGLLGEKTRQLLEFDSTNVSDTAAKPLGRPYPPYSLADFSWNNITDSLDPATLSATFQGHPMNDPTRTFANGSLAFRVQAFSRSSRPAQPPRLLHTADTCQLEVALIGASPRGNRSLFGLEVATLGQGPDCPSMQEQHSIDDEYAPAVFQLDQLLWGSLPSGFAQWRPVAYSQKPGGRESALPCQASPLHPALAYSLPQSPIVRAFFGSQNNFCAFNLTFGASTGPGYWDQHYLSWSMLLGVGFPPVDGLSPLVLGIMAVALGAPGLMLLGGGLVLLLHHKKYSEYQSIN

SEQ ID NO: 1190 - protein, 95 aa, Homo sapiens
MAASRWARKAVVLLCASDLLLLLLLLPPPGSCAAEARPGRPTSLPHLPGRRRRIFAITMMQTWRVFWSNGRKMMTLKKEIFQSTRDLQHLSTSQR

SEQ ID NO: 1191 - protein, 234 aa, Homo sapiens
MAASRWARKAVVLLCASDLLLLLLLLPPPGSCAAEGSPGTPDESTPPPRKKKKDIRDYNDADMARLLEQWEKDDDIEEGDLPEHKRPSAPVDFSKIDPSKPESILKMTKKGKTLMMFVTVSGSPTEKETEEITSLWQGSLFNANYDVQRFIVGSDRAIFMLRDGSYAWEIKDFLVGQDRCADVTLEGQVYPGKGGGSKEKNKTKQDKGKKKKEGDLKSRSSKEENRAGNKREDL

SEQ ID NO: 1192 - protein, 108 aa, Homo sapiens [sequence omitted]

SEQ ID NO: 1193 - protein, 108 aa, Homo sapiens [sequence omitted]

SEQ ID NO: 1194 - protein, 147 aa, Homo sapiens
  SITE (25): Xaa equals any of the naturally occurring L-amino acids
  SITE (30): Xaa equals any of the naturally occurring L-amino acids
  SITE (31): Xaa equals any of the naturally occurring L-amino acids
RLLHFNCHSGFLTQSPYCRQARHRXLHQGXXPAAARLWCDCQRPAPRVARTELGRHTGIHGSTFSSTTLGPIFWLLVKSPELAAQPSTYLAVAEELADVSGKYFDGLKQKAPAPEAEDEEVARRLWAESARLVGLEAPSVREQPLPR

SEQ ID NO: 1195 - protein, 240 aa, Homo sapiens; identical to SEQ ID NO: 700

SEQ ID NO: 1196 - protein, 174 aa, Homo sapiens
  SITE (142): Xaa equals any of the naturally occurring L-amino acids
  SITE (160): Xaa equals any of the naturally occurring L-amino acids
  SITE (162): Xaa equals any of the naturally occurring L-amino acids
MAVARLAAVAAWVPCRSWGWAAVPFGPHRGLSVLLARIPQRAPRWLPACRQKTSLSFLNRPDLPNLAYKKLKGKSPGIIFIPGYLSYMNGTKALAIEEFCKSLGHACIRFDYSGVGSSDGNSEESTLGKWRKDVLSIIDDLXDGPQILVGSSLGGWLMLXAXNCTTREGLALIG

SEQ ID NO: 1197 - protein, 160 aa, Homo sapiens
ILVGSSLGGWLMLHAAIARPEKVVALIGVATAADTLVTKFNQLPVELKKEVEMKGVWSMPSKYSEEGVYNVQYSFIKEAEHHCLLHSPIPVNCPIRLLHGMKDDIVPWHTSMQVADRVLSTDVDVILRKHSDHRMREKADIQLLVYTIDDLIDKLSTIVN

SEQ ID NO: 1198 - protein, 306 aa, Homo sapiens
MAVARLAAVAAWVPCRSWGWAAVPFGPHRGLSVLLARIPQRAPRWLPACRQKTSLSFLNRPDLPNLAYKKLKGKSPGIIFIPGYLSYMNGTKALAIEEFCKSLGHACIRFDYSGVGSSDGNSEESTLGKWRKDVLSIIDDLADGPQILVGSSLGGWLMLHAAIARPEKVVALIGVATAADTLVTKFNQLPVELKKEVEMKGVWSMPSKYSEEGVYNVQYSFIKEAEHHCLLHSPIPVNCPIRLLHGMKDDIVPWHTSMQVADRVLSTDVDVILRKHSDHRMREKADIQLLVYTIDDLIDKLSTIVN

SEQ ID NO: 1199 - protein, 205 aa, Homo sapiens
  SITE (40): Xaa equals any of the naturally occurring L-amino acids
  SITE (189): Xaa equals any of the naturally occurring L-amino acids
MGSWALLWPPLLFTGLLVRPPGTMAQAQYCSVNKDIFEVXENTNVTEPLVDIHVPEGQEVTLGALSTPFAFRIQGNQLFLNVTPDYEEKSLLEAQLLCQSGGTLVTQLRVFVSVLDVNDNAPEFPFKTKEIRVEEDTKVNSTVIPETQLQAEDRDKDDILVYTLQEMTAGASGLLLLVSVNRPPELDRXLTSTSGEHDLLLAGAD

SEQ ID NO: 1200 - protein, 124 aa, Homo sapiens
PQGQLGARPQPHARPQARGGTDARRARTPRPCLPRRCPEPPAAARAGGSPTAVRSILTKERRPEGGYKAVWFGEDIGTEADVVVLNAPTLDVDGASDSGSGDEGEGAGRGGGPYDAPGGDDSYI

SEQ ID NO: 1201 - protein, 447 aa, Homo sapiens
  SITE (260): Xaa equals any of the naturally occurring L-amino acids
FPAGAASTVLAHNKMLKVSAVLCVCAAAWCSQSLAAAAAVAAAGGRSDGGNFLDDKQWLTTISQYDKEVGQWNKFRDDDYFRTWSPGKPFDQALDPAKDPCLKMKCSRHKVCIAQDSQTAVCISHRRLTHRMKEAGVDHRQWRGPILSTCKQCPVVYPSPVCGSDGHTYSFQCKLEYQACVLGKQISVKCEGHCPCPSDKPTSTSRNVKRACSDLEFREVANRLRDWFKALHESGSQNKKTKTLLRPERSRFDTSILPIXKDSLGWMFNRLDTNYDLLLDQSELRSIYLDKNEQCTKAFFNSCDTYKDSLISNNEWCYCFQRQQDPPCQTELSNIQKRQGVKKLLGQYIPLCDEDGYYKPTQCHGSVGQCWCVDRYGNEVMGSRINGVADCAIDFEISGDFASGDFHEWTDDEDDEDDIMNDEDEIEDDDEDEGDDDDGGDDHDVYI

SEQ ID NO: 1202 - protein, 551 aa, Homo sapiens
MGSWALLWPPLLFTGLLVRPPGTMAQAQYCSVNKDIFEVEENTNVTEPLVDIHVPEGQEVTLGALSTPFAFRIQGNQLFLNVTPDYEEKSLLEAQLLCQSGGTLVTQLRVFVSVLDVNDNAPEFPFKTKEIRVEEDTKVNSTVIPETQLQAEDRDKDDILFYTLQEMTAGASDYFSLVSVNRPALRLDRPLDFYERPNMTFWLLVRDTPGENVEPSHTATATLVLNVVPADLRPPWFLPCTFSDGYVCIQAQYHGAVPTGHILPSPLVLRPGPIYAEDGDRGINQPIIYSIFRGNVNGTFIIHPDSGNLTVARSVPSPMTFLLLVKGQQADLARYSVTQVTVEAVAAAGSPPRFPQSLYRGTVARGAGAGVVVKDAAAPSQPLRIQAQDPEFSDLNSAITYRITNHSHFRMEGEVVLTTTTLAQAGAFYAEVAAPRRTSASRWWIWRPWAGCWVRCCCWLSLASPSLSTSTMAPGSSAALAKLRSPSPKALTTRRSSLTTRPTGRPSPAPRTTPSPRRHRCPQSPHPPALPPQAVPLSPPQRPELAEAPRR

SEQ ID NO: 1203 - protein, 71 aa, Homo sapiens
  SITE (18): Xaa equals any of the naturally occurring L-amino acids
  SITE (57): Xaa equals any of the naturally occurring L-amino acids
FCKGQAALALAACGVLLXSGGPAAAWEADPAGRCGRVPTARGRSWRKPLCGAFQPGXSWPEAPRRCRTSPC

SEQ ID NO: 1204 - protein, 52 aa, Homo sapiens
  SITE (3): Xaa equals any of the naturally occurring L-amino acids
  SITE (4): Xaa equals any of the naturally occurring L-amino acids
  SITE (25): Xaa equals any of the naturally occurring L-amino acids
  SITE (37): Xaa equals any of the naturally occurring L-amino acids
  SITE (49): Xaa equals any of the naturally occurring L-amino acids
NSXXDPDNVLWPGRWTQFCCIKVKXDFQEEASVGVSXGGYRIGVDENQXKGC

SEQ ID NO: 1205 - protein, 138 aa, Homo sapiens
VFCKGQAALALAACGVLLGSGGPAAAWEADPRGQVWPCPDRARTEVGGSPCAVPSSPEEAGLKPPGVAEASPCQRPKPRLGFYRCSFPSTWSPSTPSSPNSQPPFFFFLHASKVQGPQMYRSLMYHPAREPADYQAKK

SEQ ID NO: 1206 - protein, 193 aa, Homo sapiens
  SITE (140): Xaa equals any of the naturally occurring L-amino acids
  SITE (142): Xaa equals any of the naturally occurring L-amino acids
  SITE (147): Xaa equals any of the naturally occurring L-amino acids
  SITE (155): Xaa equals any of the naturally occurring L-amino acids
  SITE (162): Xaa equals any of the naturally occurring L-amino acids
MAGPTCRSLLLLKCLAEGRCLVCPSPSVVHCLVSVVFQMTILRDLEKLAGWHRIAIIFILSGITGNLASAIFLPYRAEVGPAGSQFGLLACSSWSSSRAGRCWRGPGRPSSTSRPSCSSWSSVASCPGSTHRPHLRASSXAXLLAFXFLPYITFXHQATSTXSGHLIPGGHLAGPLAGPSLARPFGAWGLGTF

SEQ ID NO: 1207 - protein, 349 aa, Homo sapiens
GKLVRLQVPVRNSRVDPRVRDDTGPPMDKSDLGQKRTSGAVCHQDPRTCEEPASSGAHIWPDDITKWPICTEQARSNHTGFLHVDCEIKGRPCCIGTKGSCEITTREYCEFMHGYFHEEATLCSQVHCLDKVCGLLPFLNPEVPDQFYRLWLSLFLHAGVVHCLVSVVFQMTILRDLEKLAGWHRIAIIFILSGITGNLASAIFLPYRAEVGPAGSQFGLLACLFVELFQSWPLLERPWKAFLNLSAIVLFLFICGLLPWIDNIAHIFGFLSGLLLAFAFLPYITFGTSDKYRKRALILVSLLAFAGLFAALVLWLYIYPINWPWIEHLTCFPFTSRFCEKYELDQVLH

SEQ ID NO: 1208 - protein, 217 aa, Homo sapiens [sequence omitted]

SEQ ID NO: 1209 - protein, 207 aa, Homo sapiens
  SITE (70): Xaa equals any of the naturally occurring L-amino acids
  SITE (71): Xaa equals any of the naturally occurring L-amino acids
  SITE (72): Xaa equals any of the naturally occurring L-amino acids
  SITE (73): Xaa equals any of the naturally occurring L-amino acids
  SITE (75): Xaa equals any of the naturally occurring L-amino acids
  SITE (81): Xaa equals any of the naturally occurring L-amino acids
  SITE (89): Xaa equals any of the naturally occurring L-amino acids
  SITE (90): Xaa equals any of the naturally occurring L-amino acids
  SITE (95): Xaa equals any of the naturally occurring L-amino acids
  SITE (97): Xaa equals any of the naturally occurring L-amino acids
  SITE (99): Xaa equals any of the naturally occurring L-amino acids
  SITE (105): Xaa equals any of the naturally occurring L-amino acids
  SITE (127): Xaa equals any of the naturally occurring L-amino acids
  SITE (141): Xaa equals any of the naturally occurring L-amino acids
  SITE (169): Xaa equals any of the naturally occurring L-amino acids
  SITE (178): Xaa equals any of the naturally occurring L-amino acids
  SITE (187): Xaa equals any of the naturally occurring L-amino acids
  SITE (194): Xaa equals any of the naturally occurring L-amino acids
MYYIAHLLKGALLFITIALIGSGWAFIKYVLSDKEKKVFGIVIPMQVLATWPTSSSSPARKAPATTCCGXXXXPXGPHLLXCHPVPVVXXHPASXGXVXPQDGKXASEPGQSLKLVPGIYYVMGHLXRLLSPGSIGHPACXVAWCPFSSGKWACTQASWVGRASTLGPXFGAYRAYKXSGPQGNKPXTLNLPKXGQGGMVKMEQVMD

SEQ ID NO: 1210 - protein, 553 aa, Homo sapiens
VDPRVRVAPEMAVSERRGLGRGSPAEWGQRLLLVLLLGGCSGRIHRLALTGEKRADIQLNSFGFYTNGSLEVELSVLRLGLREAEEKSLLVGFSLSRVRSGRVRSYSTRDFQDCPLQKNSSSFLVLFLINTKDLQVQVRKYGEQKTLFIFPGLLPEAPSKPGLPKPQATVPRKVDGGGTSAASKPKSTPAVIQGPSGKDKDLVLGLSHLNNSYNFSFHVVIGSQAEEGQYSLNFHNCNNSVPGKEHPFDITVMIREKNPDGFLSAAEMPLFKLYMVMSACFLAAGIFWVSILCRNTYSVFKIHWLMAALAFTKSISLLFHSINYYFINSQGHPIEGLAVMYYIAHLLKGALLFITIALIGSGWAFIKYVLSDKEKKVFGIVIPMQVLANVAYIIIESREEGASDYVLWKEILFLVDLICCGAILFPVVWSIRHLQDASGTDGKVAVNLAKLKLFRHYYVMVICYVYFTRIIAILLQVAVPFQWQWLYQLLVEGSTLAFFVLTGYKFQPTGNNPYLQLPQEDEEDVQMEQVMTDSGFREGLSKVNKTASGRELL

SEQ ID NO: 1211 - protein, 543 aa, Homo sapiens [sequence omitted]

SEQ ID NO: 1212 - protein, 204 aa, Homo sapiens
  SITE (162): Xaa equals any of the naturally occurring L-amino acids
  SITE (204): Xaa equals any of the naturally occurring L-amino acids
MAALAYNLGKREINHYFSVRSAKVLALVAVLLLAACHLASRRYRGNDSCEYLLSSGRFLGEKVWQPHSCMMHKYKISEAKNCLVDKHIAFIGDSRIRQLFYSFVKIINPQFKEEGNKHENIPFEDKTASVKVDFLWHPEVNGSMKQCIKVWTEDSIAKPHVXVAGAATWSIKIHNGSSEALSQYKMNITFIAPLLEKLAKTSDX

SEQ ID NO: 1213 - protein, 85 aa, Homo sapiens
  SITE (15): Xaa equals any of the naturally occurring L-amino acids
ELHKPFEYLIQDNGXVLLLQNNVYVCMYIWFSIYIKGLDEPPKNWLRTLQWNLQASICKSARHKTTCSLRAKRMRFSQILIILNV

SEQ ID NO: 1214 - protein, 289 aa, Homo sapiens
MAALAYNLGKREINHYFSVRSAKVLALVAVLLLAACHLASRRYRGNDSCEYLLSSGRFLGEKVWQPHSCMMHKYKISEAKNCLVDKHIAFIGDSRIRQLFYSFVKIINPQFKEEGNKHENIPFEDKTASVKVDFLWHPEVNGSMKQCIKVWTEDSIAKPHVIVAGAATWSIKIHNGSSEALSQYKMNITSIAPLLEKLAKTSDVYWVLQDPVYEDLLSENRKMITNEKIDAYNEAAVSILNSSTRNSKSNVKMFSVSKLIAQETIMESLDGLHLPESSRETVRNFYICQ

SEQ ID NO: 1215 - protein, 215 aa, Homo sapiens
CEVRPEVLFLTRHFIFHDNNNTWEGHYYHYSDPVCKHPTFSIYARGRYSRGVLSSRVMGGTEFVFKVNHMKVTPMDAATASLLNVFNGNECGAEGSWQVGIQQDVTHTNGCVALGIKLPHTEYEIFKMEQDARGRYLLFNGQRPSDGSSPDRPEKRATSYQMPLVQCASSSPRAEDLAEDSGSSLYGRAPGRHTWSLLLAALACLVPLLHWNIRR

SEQ ID NO: 1216 - protein, 466 aa, Homo sapiens
  SITE (268): Xaa equals any of the naturally occurring L-amino acids
  SITE (458): Xaa equals any of the naturally occurring L-amino acids
  SITE (460): Xaa equals any of the naturally occurring L-amino acids
  SITE (461): Xaa equals any of the naturally occurring L-amino acids
  SITE (463): Xaa equals any of the naturally occurring L-amino acids
MSWPRRLLLRYLFPALLLHGLGEGSALLHPDSRSHPRSLEKSAWRAFKESQCHHMLKHLHNGARITVQMPPTIEGHWVSTGCEVRSGPEFITRSYRFYHNNTFKAYQFYYGSNRCTNPTYTLIIRGKIRLRQASWIIRGGTEADYQLHNVQVICHTEAVAEKLGQQVNRTCPGFLADGGPWVQDVAYDLWREENGCECTKAVNFAMHELQLIRVEKQYLHHNLDHLVEELFLGDIHTDATQRMFYRPSSYQPPLQNAKNHDHACIACXIIYRSDEHHPPILPPKADLTIGLHGEWVSQRCEVRPEVLFLTRHFIFHDNNNTWEGHYYHYSDPVCKHPTFSIYARGRYSRGVLSSRVMGGTEFVFKVNHMKVTPMDAATASLLNVFNGNECGAEGSWQVGIQQDVTHTNGCVALGIKLPHTEYEIFKMEQDARGRYLLFNGQRPSDGSSPDRPRRKKGXKXXKXAPP

SEQ ID NO: 1217 - protein, 514 aa, Homo sapiens
MSWPRRLLLRYLFPALLLHGLGEGSALLHPDSRSHPRSLEKSAWRAFKESQCHHMLKHLHNGARITVQMPPTIEGHWVSTGCEVRSGPEFITRSYRFYHNNTFKAYQFYYGSNRCTNPTYTLIIRGKIRLRQASWIIRGGTEADYQLHNVQVICHTEAVAEKLGQQVNRTCPGFLADGGPWVQDVAYDLWREENGCECTKAVNFAMHELQLIRVEKQYLHHNLDHLVEELFLGDIHTDATQRMFYRPSSYQPPLQNAKNHDHACIACRIIYRSDEHHPPILPPKADLTIGLHGEWVSQRCEVRPEVLFLTRHFIFHDNNNTWEGHYYHYSDPVCKHPTFSIYARGRYSRGVLSSRVMGGTEFVFKVNHMKVTPMDAATASLLNVFNGNECGAEGSWQVGIQQDVTHTNGCVALGIKLPHTEYEIFKMEQDARGRYLLFNGQRPSDGSSPDRPEKRATSYQMPLVQCASSSPRAEDLAEDSGSSLYGRAPGRHTWSLLLAALACLVPLLHWNIRR

SEQ ID NO: 1218 - protein, 36 aa, Homo sapiens
MNNSIAAQASKFVILYLFILSFPKQCICHILSEMVW

SEQ ID NO: 1219 - protein, 101 aa, Homo sapiens [sequence omitted]

SEQ ID NO: 1220 - protein, 178 aa, Homo sapiens
HLLEVTPCRLPVPEFPGRTPRGSRTPDMRRLLLVTSLVVVLLWEAGAVPAPKVPIKMQVKHWPSEQDPEKAWGARVVEPPEKDDQLVVLFPVQKPKLLTTEEKPRGQGRGPILPGTKAWMETEDTLGRVLSPEPDHDSLYHPPPEEDQGEERPRLWVMPNHQVLLGPEEDQDHIYHPQ

SEQ ID NO: 1221 - protein, 40 aa, Homo sapiens
MNNSIAAQASKFVILYLFILSFPKQCICHILVRWSGKSHF

SEQ ID NO: 1222 - protein, 39 aa, Homo sapiens [sequence omitted]

SEQ ID NO: 1223 - protein, 54 aa, Homo sapiens
GTLQRGFLLCSLVPGWGWGTPAALTDGSPFSLSGHPSPTLTCTKFSPQLLCVAP

SEQ ID NO: 1224 - protein, 39 aa, Homo sapiens [sequence omitted]

SEQ ID NO: 1225 - protein, 167 aa, Homo sapiens
  SITE (165): Xaa equals any of the naturally occurring L-amino acids
MSLYLCVSLLISLSLSLNVSVSVSLRLCLYFSPPLSDAISLCLSLSLSVSPFLSPSLALCFLCLCLFLAQSRALGMRTRVSQGWLQLDTSGIPASPGPSKGERYVTFGVVGGAGSNLAVHSARPLIGNLLSVGPTSTLTPTRGLSWQSIAASPSSTGHAKFRETXKN

SEQ ID NO: 1226 - protein, 71 aa, Homo sapiens
  SITE (4): Xaa equals any of the naturally occurring L-amino acids
  SITE (60): Xaa equals any of the naturally occurring L-amino acids
QLRXLRDSIPEQFCNRLKAPGNRTHISGCLGGGQDLGGPERVFWDDGIFCILTVWCLHRXQHLSEINGLSL

SEQ ID NO: 1227 - protein, 114 aa, Homo sapiens
MSLYLCVSLLISLSLSLNVSVSVSLRLCLYFSPPLSDAISLCLSLSLSVSPFLSPSLALCFLCLCLFLAQSRALGMRTRVSQGWLQLDTSGIPASPGPSKGERYVYFRGGRGCG

SEQ ID NO: 1228 - protein, 123 aa, Homo sapiens
  SITE (5): Xaa equals any of the naturally occurring L-amino acids
MAALXTVLFTGVRRLHCSAAAWAGGQWRLQQGLAANPSGYGPLTELPDWSYADGRPAPPMKGQLRRKAERETFARRVVLLSQEMDAGLQAWQLRQQKLQEEQRKQENALKPKGASLKSPLPSQ

SEQ ID NO: 1229 - protein, 123 aa, Homo sapiens [sequence omitted]

SEQ ID NO: 1230 - protein, 128 aa, Homo sapiens
MGSAPWAPVLLLALGLRGLQAGARRAPDPGFQERFFQQRLDHFNFERFGNKTFPQRFLVSDRFWVRGEGPIFFYTGNEGDVWAFANNSAFVAELAAERGALLVFAEHRYYGKSLPFGAQSTQRGTRSC

SEQ ID NO: 1231 - protein, 492 aa, Homo sapiens [sequence omitted]

SEQ ID NO: 1232 - protein, 492 aa, Homo sapiens
  SITE (89): Xaa equals any of the naturally occurring L-amino acids
MGSAPWAPVLLLALGLRGLQAGARRAPDPGFQERFFQQRLDHFNFERFGNKTFPQRFLVSDRFWVRGEGPIFFYTGNEGDVWAFANNSXFVAELAAERGALLVFAEHRYYGKSLPFGAQSTQRGHTELLTVEQALADFAELLRALRRDLGAQDAPAIAFGGSYGGMLSAYLRMKYPHLVAGALAASAPVLAVAGLGDSNQFFRDVTADFEGQSPKCTQGVREAFRQIKDLFLQGAYDTVRWEFGTCQPLSDEKDLTQLFMFARNAFTVLAMMDYPYPTDFLGPLPANPVKVGCDRLLSEAQRITGLRALAGLVYNASGSEHCYDIYRLYHSCADPTGCGTGPDARAWDYQACTEINLTFASNNVTDMFPDLPFTDELRQRYCLDTWGVWPRPDWLLTSFWGGDLRAASNIIFSNGNLDPWAGGGIRRNLSASVIAVTIQGGAHHLDLRASHPEDPASVVEARKLEATIIGEWVKAARREQQPALRGGPRLSL

SEQ ID NO: 1233 - protein, 184 aa, Homo sapiens [sequence omitted]

SEQ ID NO: 1234 - protein, 130 aa, Homo sapiens
MFLELSQALLLLGLPRAPTLFPALPEGPTSLGEQWPPQLPPHLGAPPAAEGAVAMVGCGEGRGGKPLCCSPAQSPAQRVRSGGDKEPITTTEVSLILLHSRCFNLTKLKKTAFAMKKKKKKKKKKKKKKK

SEQ ID NO: 1235 - protein, 133 aa, Homo sapiens
MFLELSQALLLLGLPRAPTLFPALPEGPTSLGEQWPPQLPPHLGAPPAAEGAVAMVGCGEGRGGKPLCCSPAQSPAQRVRSGGDKEPITTTEVSLILLHSRCFNLTKLKKTAFAMKKKKKKKKKKKKKKKKKK

SEQ ID NO: 1236 - protein, 399 aa, Homo sapiens
MGILLGLLLLGHLTVDTYGRPILEVPESVTGPWKGDVNLPCTYDPLQGYTQVLVKWLVQRGSDPVTIFLRDSSGDHIQQAKYQGRLHVSHKVPGDVSLQLSTLEMDDRSHYTCEVTWQTPDGNQVVRDKITELRVQKLSVSKPTVTTGSGYGFTVPQGMRISLQCQARGSPPISYIWYKQQTNNQEPIKVATLSTLLFKPAVIADSGSYFCTAKGQVGSEQHSDIVKFVVKDSSKLLKTKTEAPTTMTYPLKATSTVKQSWDWTTDMDGYLGETSAGPGKSLPVFAIILIISLCCMVVFTMAYIMLCRKTSQQEHVYEAARAHAREANDSGETMRVAIFASGCSSDEPTSQNLGNNYSDEPCIGQEYQIIAQINGNYARLLDTVPLDYEFLATEGKSVC

SEQ ID NO: 1237 - protein, 399 aa, Homo sapiens; identical to SEQ ID NO: 1236

SEQ ID NO: 1238 - protein, 209 aa, Homo sapiens
  SITE (15): Xaa equals any of the naturally occurring L-amino acids
  SITE (18): Xaa equals any of the naturally occurring L-amino acids
  SITE (128): Xaa equals any of the naturally occurring L-amino acids
  SITE (147): Xaa equals any of the naturally occurring L-amino acids
  SITE (152): Xaa equals any of the naturally occurring L-amino acids
MAKFRRRTCIILALXILXIFSLMMGLKMLRPNTATFGAPFGLDLLPELHQRTIHLGKNFDFQKSDRINSETNTKNLKSVEITMKPSKASELNLDELPPLNNYLHVFYYSWYGNPQFDGKYIHWNHPVXEHWDPRIAKNYPQGRHNPXDDIGXSFYPELGSYSSRDPSVIETHMRQMRSASIGNYCIYIYMCVFVSVYMHINDFLCNFNS

SEQ ID NO: 1239 - protein, 81 aa, Homo sapiens [sequence omitted]

SEQ ID NO: 1240 - protein, 133 aa, Homo sapiens
MAKFRRRTCIILALFILFIFSLMMGLKMLRPNTATFGAPFGLDLLPELHQRTIHLGKNFDFQKSDRINSETNTKNLKSVEITMKPSKASELNLDELPPLNNYLHVFYYSWYGNPQFDGKYIHWNHPVLEHWDP

SEQ ID NO: 1241 - protein, 886 aa, Homo sapiens; identical to SEQ ID NO: 905
  SITE (26): Xaa equals any of the naturally occurring L-amino acids
  SITE (216): Xaa equals any of the naturally occurring L-amino acids
  SITE (234): Xaa equals any of the naturally occurring L-amino acids
  SITE (275): Xaa equals any of the naturally occurring L-amino acids
  SITE (871): Xaa equals any of the naturally occurring L-amino acids

SEQ ID NO: 1242 - protein, 831 aa, Homo sapiens
MAARGRGLLLLTLSVLLAAGPSAAAAKLNIPKVLLPFTRATRVNFTLEASEGCYRWLSTRPEVASIEPLGLDEQQCSQKAVVQARLTQPARLTSIIFAEDITTGQVLRCDAIVDLIHDIQIVSTTRELYLEDSPLELKIQALDSEGNTFSTLAGLVFEWTIVKDSEADRFSDSHNALRILTFLESTYIPPSYISEMEKAAKQGDTILVSGMKTGSSKLKARIQEAVYKNVRPAEVRLLILENILLNPAYDVYLMVGTSIHYKVQKIRQGKITELSMPSDQYELQLQNSIPGPEGDPTRPVAVLAQDTSMVTALQLGQSSLVLGHRSIRMQGASRLPNSTIYVVEPGYLGFTVHPGDRWVLETGRLYEITIEVFDKFSNKVYVSDNIRIETVLPAEFFEVLSSSQNGSYHRIRALKRGQTAIDAALTSVVDQDGGVHILQVPVWNQQEVEIHIPITLYPSILTFPWQPKTGAYQYTIRAHGGSGNFSWSSSSHLVATVTVKGVMTTGSDIGFSVIQAHDVQNPLHFGEMKVYVIEPHSMEFAPCQVEARVGQALELPLRISGLMPGGASEVVTLSDCSHFDLAVEVENQGVFQPLPGRLPPGSEHCSGVRVKAEAQGSTTLLVSYRHGHVHLSAKITIAAYLPLKAVDPSSVALVTLGSSKEMLFEGGPRPWILEPSKFFQNVTAEDTDSIGLALFAPHSSRNYQQHWILVTCQALGEQVIALSVGNKPSLTNPFPAVEPAVVKFVCAPPSRLTLVPVYTSPQLDMSCPLLQQNKQVVPVSSHRNPLLDLAAYDQEGRRFDNFSSLSIQWESTRPVLAASSLSCHAAGVPGR

SEQ ID NO: 1243 - protein, 89 aa, Homo sapiens
  SITE (39): Xaa equals any of the naturally occurring L-amino acids
  SITE (65): Xaa equals any of the naturally occurring L-amino acids
MPVPLLASAAWCHLCAGALPAWLWLPGGQLLHNGTCVPXTACPCTQHSLPWGLTLTLEEQAQELXPGTVLTRNCTPLCLPLWSLQLLPR

SEQ ID NO: 1244 - protein, 79 aa, Homo sapiens; identical to SEQ ID NO: 549

SEQ ID NO: 1245 - protein, 89 aa, Homo sapiens; identical to SEQ ID NO: 550

SEQ ID NO: 1246 - protein, 334 aa, Homo sapiens
  SITE (124): Xaa equals any of the naturally occurring L-amino acids
  SITE (129): Xaa equals any of the naturally occurring L-amino acids
  SITE (214): Xaa equals any of the naturally occurring L-amino acids
  SITE (224): Xaa equals any of the naturally occurring L-amino acids
MDQALSLWFLLGWIGGDSCNLIGSFLADQLPLQTYTAVYYVLADLVMLTLYFYYKFRTRPSLLSAPINSVLLFLMGMACATPLLSAAGPVAAPREAFRGRALLSVESGSKPFTRQEVIGFVIGXISSVXYLLSRLPQIRTNFLRKSTQGISYSLFALVMLGNTLYGLSVLLKNPEEGQSEGSYLLHHLPWLVGSLGVLLLDTIISIQFLVYRRXPPPRSLSPSXPADQNQAERRRTGTTGCHTRQEEVWTVMVRRPCISLRVASGSSVDRTVPPGTHLQVDPEASRPGLERRPQGLSGDSEAAPPTTYLILPTQDCPVNSRQLNKQAGYSGSHL

SEQ ID NO: 1247 - protein, 226 aa, Homo sapiens
MDQALSLWFLLGWIGGDSCNLIGSFLADQLPLQTYTAVYYVLADLVMLTLYFYYKFRTRPSLLSAPINSVLLFLMGMACATPLLSAAGPVAAPREAFRGRALLSVESGSKPFTRQEVIGFVIGSISSVLYLLSRLPQIRTNFLRKSTQGISYSLFALVMLGNTLYGLSVLLKNPEEGQSEGSYLLHHLPWLVGSLGVLLLDTIISIQFLVYRRSTAASELEPLLPS

SEQ ID NO: 1248 - protein, 184 aa, Homo sapiens
MKILVAFLVVLTIFGIQSHGYEVFNIISPSNNGGNVQETVTIDNEKNTAIINIHAGSCSSTTIFDYKHGYIASRVLSRRACFILKMDHQNIPPLNNLQWYIYEKQALDNMFSSKYTWVKYNPLESLIKDVDWFLLGSPIEKLCKHIPLYKGEVVENTHNVGAGGCAKAGLLGILGISICADIHV

SEQ ID NO: 1249 - protein, 184 aa, Homo sapiens; identical to SEQ ID NO: 1248

SEQ ID NO: 1250 - protein, 173 aa, Homo sapiens
MAVRALKLLTTLLAVVAAASQAEVESEAGWGMVTPDLLFAEGTAAYARGDWPGVVLSMERALRSRAALRALRLRCRTQCAADFPWELDPDWSPSPAQASGAAALRDLSFFGGLLRRAACLRRCLGPPAATRSAKRWSWSSASGPLQLPAGRLLQDQQVGESCCCSTHLLRGQS

SEQ ID NO: 1251 - protein, 359 aa, Homo sapiens
MAVRALKLLTTLLAVVAAASQAEVESEAGWGMVTPDLLFAEGTAAYARGDWPGVVLSMERALRSRAALRALRLRCRTQCAADFPWELDPDWSPSPAQASGAAALRDLSFFGGLLRRAACLRRCLGPPAAHSLSEEMELEFRKRSPYNYLQVAYFKINKLEKAVAAAHTFFVGNPEHMEMQQNLDYYQTMSGVKEADFKDLETQPHMQEFRLGVRLYSEEQPQEAVPHLEAALQEYFVAYEECRALCEGPYDYDGYNYLEYNADLFQAITDHYIQVLNCKQNCVTELASHPSREKPFEDFLPSHYNYLQFAYYNIGNYTQAVECAKTYLLFFPNDEVMNQNLALLCSYAWRRTHQIHRPP

SEQ ID NO: 1252 - protein, 77 aa, Homo sapiens
MTIFTPFLVLLLLVNSPRFSTITLMRSGFHNPSVCLSFTLKPQCYLVLMYQKNRRQDGSKVFFKTARLKFYLNITAK

SEQ ID NO: 1253 - protein, 77 aa, Homo sapiens; identical to SEQ ID NO: 1252

SEQ ID NO: 1254 - protein, 140 aa, Homo sapiens
  SITE (136): Xaa equals any of the naturally occurring L-amino acids
MASLGLQLVGYILGLLGLLGTLVAMLLPSWKTSSYVGASIVTAVGFSKGLWMECATHSTGITQCDIYSTLLGLPADIQAAQAMMVTSSAISSLACIISVVGMRCTVFCQESRAKDRVAVAGGVFFILGSLLGFIPXAWNL

SEQ ID NO: 1255 - protein, 86 aa, Homo sapiens
  SITE (33): Xaa equals any of the naturally occurring L-amino acids
  SITE (43): Xaa equals any of the naturally occurring L-amino acids
RRFYSPLVPDSMKFEIGEALYLGIISSLFSLIXGIILCFSCSXQRNRSNYYDAYQAQPLATRSSPRPGQPPKVKSEFNSYSLTGYV

SEQ ID NO: 1256 - protein, 230 aa, Homo sapiens
MASLGLQLVGYILGLLGLLGTLVAMLLPSWKTSSYVGASIVTAVGFSKGLWMECATHSTGITQCDIYSTLLGLPADIQAAQAMMVTSSAISSLACIISVVGMRCTVFCQESRAKDRVAVAGGVFFILGGLLGFIPVAWNLHGILRDFYSPLVPDSMKFEIGEALYLGIISSLFSLIAGIILCFSCSSQRNRSNYYDAYQAQPLATRSSPRPGQPPKVKSEFNSYSLTGYV

SEQ ID NO: 1257 - protein, 331 aa, Homo sapiens
MWLWEDQGGLLGPFSFLLLVLLLVTRSPVNACLLTGSLFVLLRVFSFEPVPSCRALQVLKPRDRISAIAHRGGSHDAPENTLAAIRQAAKNGATGVELDIEFTSDGIPVLMHDNTVDRTTDGTGRLCDLTFEQIRKLNPAANHRLRNDFPDEKIPTLREAVAECLNHNLTIFFDVKGHAHKATEALKKMYMEFPQLYNNSVVCSFLPEVIYKMRQTDRDVITALTHRPWSLSHTGDGKPRYDTFWKHFIFVMMDILLDWSMHNILWYLCGISAFLMQKDFVSPAYLKKWSAKGIQVVGWTVNTFDEKSYYESHLGSSYITDSMVEDCEPHF

SEQ ID NO: 1258 - protein, 27 aa, Homo sapiens
GTPAGTGPEFPGRPTRPIGVHLHSVRD

SEQ ID NO: 1259 - protein, 485 aa, Homo sapiens
ARGRLLPWWLAAGCSMSRLGALGGARAGLGLLLGTAAGLGFLCLLYSQRWKRTQRHGRSQSLPNSLDYTQTSDPGRHVMLLRAVPGGAGDASVLPSLPREGQEKVLDRLDFVLTSLVALRREVEELRSSLRGLAGEIVGEVRCHMEENQRVARRRRFPFVRERSDSTGSSSVYFTASSGATFTDAESEGGYTTANAESDNERDSDKESEDGEDEVSCETVKMGRKDSLDLEEEAASGASSALEAGGSSGLEDVLPLLQQADELHRGDEQGKREGFQLLLNNKLVYGSRQDFLWRLARAYSDMCELTEEVSEKKSYALDGKEEAEAALEKGDESADCHLWYAVLCGQLAEHESIQRRIQSGFSFKEHVDKAIALQPENPMAHFLLGRWCYQVSHLSWLEKKTATALLESPLSATVEDALQSFLKAEELQPGFSKAGRVYISKCYRELGKNSEARWWMKLALELPDVTKEDLAIQKDLEELEVILRD

SEQ ID NO: 1260 - protein, 470 aa, Homo sapiens
MSRLGALGGARAGLGLLLGTAAGLGFLCLLYSQRWKRTQRHGRSQSLPNSLDYTQTSDPGRHVMLLRAVPGGAGDASVLPSLPREGQEKVLDRLDFVLTSLVALRREVEELRSSLRGLAGEIVGEVRCHMEENQRVARRRRFPFVRERSDSTGSSSVYFTASSGATFTDAESEGGYTTANAESDNERDSDKESEDGEDEVSCETVKMGRKDSLDLEEEAASGASSALEAGGSSGLEDVLPLLQQADELHRGDEQGKREGFQLLLNNKLVYGSRQDFLWRLARAYSDMCELTEEVSEKKSYALDGKEEAEAALEKGDESADCHLWYAVLCGQLAEHESIQRRIQSGFSFKEHVDKAIALQPENPMAHFLLGRWCYQVSHLSWLEKKTATALLESPLSATVEDALQSFLKAEELQPGFSKAGRVYISKCYRELGKNSEARWWMKLALELPDVTKEDLAIQKDLEELEVILRD

SEQ ID NO: 1261 - protein, 37 aa, Homo sapiens
MPDKREATAAAVALFIVPLGVWMRGSRGYSAAHEGSL

SEQ ID NO: 1262 - protein, 37 aa, Homo sapiens; identical to SEQ ID NO: 1261

SEQ ID NO: 1263 - protein, 105 aa, Homo sapiens [sequence omitted]

SEQ ID NO: 1264 - protein, 105 aa, Homo sapiens [sequence omitted]

SEQ ID NO: 1265 - protein, 101 aa, Homo sapiens
  SITE (101): Xaa equals any of the naturally occurring L-amino acids
MTLCLVTFLTSLPTSVPACTSCWPGFMRSSKNAYDTHHWGGQRSMNLESLTCGQLAIRWTRGWMTRPRQVWAMPGQTVDVYLGRMLQGVVLRGQTLRGRAX

SEQ ID NO: 1266 - protein, 50 aa, Homo sapiens
KAVTGWAHWLTPIIPALWEAKAGRSLEVRISRPAWSTWQNLVSTKNTKIR

SEQ ID NO: 1267 - protein, 120 aa, Homo sapiens
EVLFSNDSVLGHFPHQSPNERARLYFLLAWFHAIIQERLRYAPLGWSKKYEFGESDLRSACDTVDTWLDDTAKASVGHARTDSGRVSGKDAAGRGAERPDSAWKSELTPRDRQSLAGHGE

SEQ ID NO: 1268 - protein, 103 aa, Homo sapiens
MMCVVLTTLPCLTFSIAVTEVQKSINGSADVLPDMLPDLPVSLVLLSLIMVDIIEKLRIYPLRGSQKSSENGHIHSTSLQHIKTVTEQVRQSPENAASPQATN

SEQ ID NO: 1269 - protein, 261 aa, Homo sapiens
MMCVVLTTLPCLTFSIAVTEVQKSINGSADVLPDMLPDLPVSLVLLSLIMVDIIEKLRIYPLRGSQKSSENGHIHSTSLQHIKTVTEQVRQSPENAASPQATNSTQVSQPSGAMTRSQESVFMGPQEPSCDSGILRMMSRRDVRAELFLWSFLLWSDTIEMVRVAGHPNVYKSSWLYPVYIFSFISLLRITFTPQNPLLNSLSVLLQDLPFVFVRLGLIIALGTITPVLGLCKNILVTLSYIYFNYLTRIRIFSAFEMSPF

SEQ ID NO: 1270 - protein, 277 aa, Homo sapiens
  SITE (158): Xaa equals any of the naturally occurring L-amino acids
  SITE (277): Xaa equals any of the naturally occurring L-amino acids
MGLRSWLAAPWGALPPRPPLLLLLLLLLLLQPPPPTWALSPRISLPLGSEERPFLRFEAEHISNYTALLLSRDGRTLYVGAREALFALSSNLSFLPGGEYQELLWGADAEKKQQCSFKGKDPQRDCQNYIKILLPLSGSHLFTCGTAAFSPMCTYINXENFTLARDEKGNVLLEDGKGRCPFDPNFKSTALVVDGELYTGTVSSFQGNDPAISRSQSLRPTKTESSLNWLQDPAFVASAYIPESLGSLQGDDDKIYFFFSETGQEFEFFENTIVSGX

SEQ ID NO: 1271 - protein, 832 aa, Homo sapiens
MGLRSWLAAPWGALPPRPPLLLLLLLLLLLQPPPPTWALSPRISLPLGSEERPFLRFEAEHISNYTALLLSRDGRTLYVGAREALFALSSNLSFLPGGEYQELLWGADAEKKQQCSFKGKDPQRDCQNYIKILLPLSGSHLFTCGTAAFSPMCTYINMENFTLARDEKGNVLLEDGKGRCPFDPNFKSTALVVDGELYTGTVSSFQGNDPAISRSQSLRPTKTESSLNWLQDPAFVASAYIPESLGSLQGDDDKIYFFFSETGQEFEFFENTIVSRIARICKGDEGGERVLQQRWTSFLKAQLLCSRPDDGFPFNVLQDVFTLSPSPQDWRDTLFYGVFTSQWHRGTTEGSAVCVFTMKDVQRVFSGLYKEVNRETQQWYTVTHPVPTPRPGACITNSARERKINSSLQLPDRVLNFLKDHFLMDGQVRSRMLLLQPQARYQRVAVHRVPGLHHTYDVLFLGTGDGRLHKAVSVGPRVHIIEELQIFSSGQPVQNLLLDTHRGLLYAASHSGVVQVPMANCSLYRSCGDCLLARDPYCAWSGSSCKHVSLYQPQLATRPWIQDIEGASAKDLCSASSVVSPSFVPTGEKPCEQVQFQPNTVNTLACPLLSNLATRLWLRNGAPVNASASCHVLPTGDLLLVGTQQLGEFQCWSLEEGFQQLVASYCPEVVEDGVADQTDEGGSVPVIISTSRVSAPAGGKASWGADRSYWKEFLVMCTLFVLAVLLPVLFLLYRHRNSMKVFLKQGECASVHPKTCPVVLPPETRPLNGLGPPSTPLDHRGYQSLSDSPPGARVFTESEKRPLSIQDSFVEVSPVCPRPRVRLGSEIRDSVV

SEQ ID NO: 1272 - protein, 196 aa, Homo sapiens
  SITE (12): Xaa equals any of the naturally occurring L-amino acids
  SITE (22): Xaa equals any of the naturally occurring L-amino acids
  SITE (55): Xaa equals any of the naturally occurring L-amino acids
  SITE (147): Xaa equals any of the naturally occurring L-amino acids
  SITE (156): Xaa equals any of the naturally occurring L-amino acids
  SITE (184): Xaa equals any of the naturally occurring L-amino acids
MGKWKESLQNAXHLPPILLLRXIHLFCAVLAGGKENGQMAVSDGSVKGLLSVVRXWSRGPAPDPCLVPLALEALVGAVHVLHASRAPPRGPELRALLESYFHVLNADWPAGLSSGPEEALVTLRVSMLDAIPMMLHVKTGQCLQPPXSATIALNTXLGSFKNKQGSWTKTQTHCSPCSQSADLXHEVTPLGPRRWL

SEQ ID NO: 1273 - protein, 347 aa, Homo sapiens [sequence omitted]

SEQ ID NO: 1274 - protein, 347 aa, Homo sapiens [sequence omitted]

SEQ ID NO: 1275 - protein, 347 aa, Homo sapiens [sequence omitted]

SEQ ID NO: 1276 - protein, 286 aa, Homo sapiens
  SITE (173): Xaa equals any of the naturally occurring L-amino acids
MLMLMLLMMFAVHCTWVTSNAYSSPSVVLASYNHDGTRNILDDFREAYFWLRQNTDEHARVMSWWDYGYQIAGMANRTTLVDNNTWNNSHIALVGKAMSSNETAAYKIMRTLDVDYVLVIFGGVIGYSGDDINKFLWMVRIAEGEHPKDIRESDYFTPQGEFRVDKAGSPTLXNCLMYKMSYYRFGEMQLDFRTPPGFDRTRNAEIGNKDIKFKHLEEAFTSEHWLVRIYKVKAPDNRETLDHKPRVTNIFPKQKYLSKKTTKRKRGYIKNKLVFKKGKKISKKTV

SEQ ID NO: 1277 - protein, 286 aa, Homo sapiens
MLMLMLLMMFAVHCTWVTSNAYSSPSVVLASYNHDGTRNILDDFREAYFWLRQNTDEHARVMSWWDYGYQIAGMANRTTLVDNNTWNNSHIALVGKAMSSNETAAYKIMRTLDVDYVLVIFGGVIGYSGDDINKFLWMVRIAEGEHPKDIRESDYFTPQGEFRVDKAGSPTLLNCLMYKMSYYRFGEMQLDFRTPPGFDRTRNAEIGNKDIKFKHLEEAFTSEHWLVRIYKVKAPDNRETLDHKPRVTNIFPKQKYLSKKTTKRKRGYIKNKLVFKKGKKISKKTV

SEQ ID NO: 1278 - protein, 135 aa, Homo sapiens
  SITE (134): Xaa equals any of the naturally occurring L-amino acids
MSALRPLLLLLLPLCPGPGPGPGSEAKVTRSCAETRQVLGARGYSLNLIPPALISGEHLRVCPQEYTCCSSETEQRLIRETEATFRGLVEDSGSFLVHTLAARHRKFDDNPDPGGCPSLLCKAWRLEEMWSSEXA

SEQ ID NO: 1279 - protein, 134 aa, Homo sapiens
MSALRPLLLLLLPLCPGPGPGPGSEAKVTRSCAETRQVLGARGYSLNLIPPALISGEHLRVCPQEYTCCSSETEQRLIRETEATFRGLVEDSGSFLVHTLAARHRKFDDNPDPGGCPSLCAGPGDWKKCGQRCA

SEQ ID NO: 1280 - protein, 52 aa, Homo sapiens
  SITE (4): Xaa equals any of the naturally occurring L-amino acids
  SITE (25): Xaa equals any of the naturally occurring L-amino acids
CALXFEFFFFFFFLRWSLGNKARLXQKKKKKKKTSVGKNMENWNPDTLLVGL

SEQ ID NO: 1281 - protein, 17 aa, Homo sapiens
MRVVSGTLFIHFLVLIF

SEQ ID NO: 1282 - protein, 17 aa, Homo sapiens
MRVVSGTLFIHFLVLIF

SEQ ID NO: 1283 - protein, 182 aa, Homo sapiens
MAKRSRGPGRRCLLALVLFCAWGTLAVVAQKPGAGCPSRCLCFRTTVRCMHLLLEAVPAVAPQTSILDLRFNRIREIQPGAFRRLRNLNTLLLNNNQIKRIPSGAFEDLENLKYLYLHFNQIETLDPDSFQHLPKLERLFLHNNRITHLVPGTFNHLESMKRLRLDSNTLHCDCEILWLRIC

SEQ ID NO: 1284 - protein, 550 aa, Homo sapiens
ALPQQAAVAGIVQRSGKPLLPFATGPPTECMRDENESPIPCFLAGDHRANEQLGLTSMHTLWFREHNRIATELLKLNPHWDGDTIYYETRKIVGAEIQHITYQHWLPKILGEVGMRTLGEYHGYDPGINAGIFNAFATAAFRFGHTLVNPLLYRLDENFQPIAQDHLPLHKAFFSPFRIVNEGGIDPLLRGLFGVAGKMRVPSQLLNTELTERLFSMAHTVALDLAAINIQRGRDHGIPPYHDYRVYCNLSAAHTFEDLKNEIKNPEIREKLKRLYGSTLNIDLFPALVVEDLVPGSRLGPTLMCLLSTQFKRLRDGDRLWYENPGVFSPAQLTQIKQTSLARILCDNADNITRVQSDVFRVAEFPHGYGSCDEIPRVDLRVWQDCCEDCRTRGQFNAFSYHFRGRRSLEFSYQEDKPTKKTRPRKIPSVGRQGEHLSNSTSAFSTRSDASGTNDFREFVLEMQKTITDLRTQIKKLESRLSTTECVDAGGESHANNTKWKKDACTICECKDGQVTCFVEACPPATCAVPVNIPGACCPVCLQKRAEEKP

SEQ ID NO: 1285 - protein, 210 aa, Homo sapiens
  SITE (139): Xaa equals any of the naturally occurring L-amino acids
  SITE (187): Xaa equals any of the naturally occurring L-amino acids
MEAPGPRALRTALCGGCCCLLLCAQLAVAGKGARGFGRGALIRLNIWPAVQGACKQLEVCEHCVEGDRARNLSSCMWEQCRPEEPGHCVAQSEVVKEGCSIYNRSEACPAAHHHPTYEPKTVTTGSPPVPEAHSPGFDXASFIGGVVLVLSLQAVAFFVLTSSRPRTAPTRRCEYLASSKYLSPSSXLVPAHVPFSTQGAVFSTGKPSGR

SEQ ID NO: 1286 - protein, 173 aa, Homo sapiens
MEAPGPRALRTALCGGCCCLLLCAQLAVAGKGARGFGRGALIRLNIWPAVQGACKQLEVCEHCVEGDRARNLSSCMWEQCRPEEPGHCVAQSEVVKEGCSIYNRSEACPAAHHHPTYEPKTVTTGSPPVPEAHSPGFDGASFIGGVVLVLSLQAVAFFVLHFLKAKDSTYQTL

SEQ ID NO: 1287 - protein, 148 aa, Homo sapiens
MTWKIKLRSAVYLSDATVTTLGNLVPFTLTLLCFLLLICSLCKHLKKMQLHGKGSQDPSTKVHIKVLQTVIFFLLLCAIYFLSIMISVWSFGSLENKPVFMFCKAIRFSYPSIHPFILIWGNKKLKQTFLSVLRQVRYWVKGEKPSSP

SEQ ID NO: 1288 - protein, 55 aa, Homo sapiens
NERVLTYSLIGSSIIRKKCTVLFTAKFYLTVLILGVMKFKQCDLNLKKKKKKGRP

SEQ ID NO: 1289 - protein, 273 aa, Homo sapiens
  SITE (200): Xaa equals any of the naturally occurring L-amino acids
MRLPGVPLARPALLLLLPLLAPLLGTGAPAELRVRVRLPDGQVTEESLQADSDADSISLELRKPDGTLVSFTADFKKDVKVFRALILGELEKGQSQFQALCFVTQLQHNEIIPSEAMAKLRQKNPRAVRQAEEVRGLEHLHMDVAVNFSQGALLSPHLHNVCAEAVDAIYTRQEDVRFWLEQGVDSSVFEALPKASEQAXLPRCRQVGDRGKPCVCHYGLSLAWYPCMLKYCHSRDRPTPYKCGIRSCQKSYSFDFYVPQRQLCLWDEDPYPG

SEQ ID NO: 1290 - protein, 273 aa, Homo sapiens
  SITE (217): Xaa equals any of the naturally occurring L-amino acids
MRLPGVPLARPALLLLLPLLAPLLGTGAPAELRVRVRLPDGQVTEESLQADSDADSISLELRKPDGTLVSFTADFKKDVKVFRALILGELEKGQSQFQALCFVTQLQHNEIIPSEAMAKLRQKNPRAVRQAEEVRGLEHLHMDVAVNFSQGALLSPHLHNVCAEAVDAIYTRQEDVRFWLEQGVDSSVFEALPKASEQAELPRCRQVGDRGKPCVCXYGLSLAWYPCMLKYCHSRDRPTPYKCGIRSCQKSYSFDFYVPQRQLCLWDEDPYPG

SEQ ID NO: 1291 - protein, 934 aa, Homo sapiens
  SITE (225): Xaa equals any of the naturally occurring L-amino acids
  SITE (596): Xaa equals any of the naturally occurring L-amino acids
  SITE (852): Xaa equals any of the naturally occurring L-amino acids
MLAGCFLLILGQIVLLPAEARERSRGRSISRGRHARTHPQTALLESSCENKRADLVFIIDSSRSVNTHDYAKVKEFIVDILQFLDIGPDVTRVGLLQYGSTVKNEFSLKTFKRKSEVERAVKRMRHLSTGTMTGLAIQYALNIAFSEAEGARPLRENVPRVIMIVTDGRPQDSVAEVAAKARDTGILIFAIGVGQVDFNTLKSIGSEPHEDHVFLVANFSQIETXTSVFQKKLCTAHMCSTLEHNCAHFCINIPGSYVCRCKQGYILNSDQTTCRIQDLCAMEDHNCEQLCVNVPGSFVCQCYSGYALAEDGKRCVAVDYCASENHGCEHECVNADGSYLCQCHEGFALNPDEKTCTKIDYCASSNHGCQHECVNTDDSYSCHCLKGFTLNPDKKTCRRINYCALNKPGCEHECVNMEESYYCRCHRGYTLDPNGKTCSRVDHCAQQDHGCEQLCLNTEDSFVCQCSEGFLINEDLKTCSRVDYCLLSDHGCEYSCVNMDRSFACQCPEGHVLRSDGKTCAKLDSCALGDHGCEHSCVSSEDSFVCQCFEGYILREDGKTCRRKDVCQAIDHGCEHICVNSDDSYTCECLEGFRLXEDGKRCRRKDVCKSTHHGCEHICVNNGNSYICKCSEGFVLAEDGRRCKKCTEGPIDLVFVIDGSKSLGEENFEVVKQFVTGIIDSLTISPKAARVGLLQYSTQVHTEFTLRNFNSAKDMKKAVAHMKYMGKGSMTGLALKHMFERSFTQGEGARPLSTRVPRAAIVFTDGRAQDDVSEWASKAKANGITMYAVGVGKAIEEELQEIASEPTNKHLFYAEDFSTMDEISEKLKKGICEALEDSDGRQDSPAGELPKXVQQPTVQHRYLFEEDNLLRSTQKLSHSTKPSGSPLEEKHDQCKCENLIMFQNLANEEVRKLTQRLEEMTQRMEALENRLRYR

SEQ ID NO: 1292 - protein, 794 aa, Homo sapiens
MLAGCFLLILGQIVLLPAEARERSRGRSISRGRHARTHPQTALLESSCENKRADLVFIIDSSRSVNTHDYAKVKEFIVDILQFLDIGPDVTRVGLLQYGSTVKNEFSLKTFKRKSEVERAVKRMRHLSTGTMTGLAIQYALNIAFSEAEGARPLRENVPRVIMIVTDGRPQDSVAEVAAKARDTGILIFAIGVGQVDFNTLKSIGSEPHEDHVFLVANFSQIETLTSVFQKKLCTAHMCSTLEHNCAHFCINIPGSYVCRCKQGYILNSDQTTCRIQDLCAMEDHNCEQLCVNVPGSFVCQCYSGYALAEDGKRCVAVDYCASENHGCEHECVNADGSYLCQCHEGFALNPDEKTCTKIDYCASSNHGCQHECVNTDDSYSCHCLKGFTLNPDKKTCRRINYCALNKPGCEHECVNMEESYYCRCHRGYTLDPNGKTCSRVDHCAQQDHGCEQLCLNTEDSFVCQCSEGFLINEDLKTCSRVDYCLLSDHGCEYSCVNMDRSFACQCPEGHVLRSDGKTCAKLDSCALGDHGCEHSCVSSEDSFVCQCFEGYILREDGKTCRRKDVCQAIDHGCEHICVNSDDSYTCECLEGFRLAEDGKRCRRKDVCKSTHHGCEHICVNNGNSYICKCSEGFVLAEDGRRCKKCTEGPIDLVFVIDGSKSLGEENFEVVKQFVTGIIDSLTISPKAARVGLLQYSTQVHTEFTLRNFNSAKDMKKAVAHMKYMGKGSMTGLALKHMFERSFTQGEGARPLSTRVPRAAIVFTDGRAQDDVSEWASKARPWYHYVCCWGRKSH

SEQ ID NO: 1293 - protein, 39 aa, Homo sapiens
MRRPAAVPLLLLLCFGSQRAKAATACGRPRMLNRMVGGQ

SEQ ID NO: 1294 - protein, 290 aa, Homo sapiens
MRRPAAVPLLLLLCFGSQRAKAATACGRPRMLNRMVGGQDTQEGEWPWQVSIQRNGSHFCGGSLIAEQWVLTAAHCFRNTSETSLYQVLLGARQLVQPGPHAMYARVRQVESNPLYQGTASSADVALVELEAPVPFTNYILPVCLPDPSVIFETGMNCWVTGWGSPSEEDLLPEPRILQKLAVPIIDTPKCNLLYSKDTEFGYQPKTIKNDMLCAGFEEGKKDACKGDSGGPLVCLVGQSWLQAGVISWGEGCARQNRPGVYIRVTAHHNWIHRIIPKLQFQPARLGGQK

SEQ ID NO: 1295 - protein, 144 aa, Homo sapiens
  SITE (77): Xaa equals any of the naturally occurring L-amino acids
  SITE (122): Xaa equals any of the naturally occurring L-amino acids
  SITE (141): Xaa equals any of the naturally occurring L-amino acids
MLLGVGLVVLALIAGWVLQQANRSAQQLTATGQSLMQSQRLAKSVSQALVGSPQAFPDVVESSGVLARNVRALNGGXNELDVQALGEPFRPELDAITPLVERAERNAGVVMGQQKILTQVGXALRTIKPPVLGPCWRSRRXSSS

SEQ ID NO: 1296 - protein, 187 aa, Homo sapiens
  SITE (16): Xaa equals any of the naturally occurring L-amino acids
  SITE (72): Xaa equals any of the naturally occurring L-amino acids
TSRVWCPHVRRNRPSXQTAEPCAVNWKACKATVGTIGHGCGPAIALAVAGIFVLLCGVGISRVQLLDSRSRXATAEAQQRDAKRQEQEAKRINDANQAAILRLMNELQSVAEGDLTQEATVTEDITGAIADSVNYTVEESASWWATCRTPRPGWPRPPRRWTAPLRNCWRLRPSSCVKSVKRAVRCS

SEQ ID NO: 1297 - protein, 346 aa, Homo sapiens
MLLGVGLVVLALIAGWVLQQANRSAQQLTATGQSLMQSQRLAKSVSQALVGSPQAFPDVVESSGVLARNVRALNGGDNELDVQALGEPFRPELDAITPLVERAERNAGVVMGQQKILTQVGDALRTINRQSSDLLEIAETVSSLKLQQNAPASEISAAGQLVMLTQRIGKSANEFQTTEGVSPEAVFLLGKDLNSFKEIARGMLDGSADLRLAATRDAQTREQLESLIKLYEQTRTQAGAILGNLQGLVSAREAQSAILADSEPLRRQLEGLQSKLSAQSGMGAASSLRSPSPVSSSCCAAWVFRACSCWTAAAAKPRPKHSSVMPSARNRKPSASTTPTRRPFCD

SEQ ID NO: 1298 - protein, 29 aa, Homo sapiens
MHLVGGTLLVLAPRGAVLPLSSQSMPFLQ

SEQ ID NO: 1299 - protein, 29 aa, Homo sapiens
MHLVGGTLLVLAPRGAVLPLSSQSMPFLQ

SEQ ID NO: 1300 - protein, 299 aa, Homo sapiens
MGTKAQVERKLLCLFILAILLCSLALGSVTVHSSEPEVRIPENNPVKLSCAYSGFSSPRVEWKFDQGDTTRLVCYNNKITASYEDRVTFLPTGITFKSVTREDTGTYTCMVSEEGGNSYGEVKVKLIVLVPPSKPTVNIPSSATIGNRAVLTCSEQDGSPPSEYTWFKDGIVMPTNPKSTRAFSNSSYVLNPTTGELVFDPLSASDTGEYSCEARNGYGTPMTSNAVRMEAVERNVGVIVAAVLVTLILLGILVFGIWFAYSRGHFDRTKKGTSSKKVIYSQPSARSEGEFKQTSSFLV

SEQ ID NO: 1301 - protein, 299 aa, Homo sapiens; identical to SEQ ID NO: 1300

SEQ ID NO: 1302 - protein, 136 aa, Homo sapiens
ARAKPERPAGWAESVLEEDASELEPAFSRTVGTIQHCLHLTSVYTHFLPQRGRPEVTTMPLGLGMTVDYIFFSAESCENGNRTDHRLYRDGTLKLLGRLSLLSEEILWAANGLPNPFCSSDHLCLLASFGMEVTAP

SEQ ID NO: 1303 - protein, 100 aa, Homo sapiens
  SITE (22): Xaa equals any of the naturally occurring L-amino acids
  SITE (83): Xaa equals any of the naturally occurring L-amino acids
  SITE (92): Xaa equals any of the naturally occurring L-amino acids
  SITE (95): Xaa equals any of the naturally occurring L-amino acids
MIASCLCYLLLPATRLFRALSXAFFTCRKNVLLANSSSPQVEGDFAMAPRGPEQEECEGLLQQWREEGLSQVLSTASEGPLIXKGLAQSSLXLLXDNPGE

SEQ ID NO: 1304 - protein, 670 aa, Homo sapiens
MIASCLCYLLLPATRLFRALSDAFFTCRKNVLLANSSSPQVEGDFAMAPRGPEQEECEGLLQQWREEGLSQVLSTASEGPLIDKGLAQSSLALLMDNPGEENAASEDRWSSRQLSDLRAAENLDEPFPEMLGEEPLLEVEGVEGSMWAAIPMQSEPQYADCAALPVGALATEQWEEDPAVLAWSIAPEPVPQEEASIWPFEGLGQLQPPAVEIPYHEILWREWEDFSTQPDAQGLKAGDGPQFQFTLMSYNILAQDLMQQSSELYLHCHPDILNWNYRFVNLMQEFQHWDPDILCLQEVQEDHYWEQLEPSLRMMGFTCFYKRRTGCKTDGCAVCYKPTRFRLLCASPVEYFRPGLELLNRDNVGLVLLLQPLVPEGLGQVSVAPLCVANTHILYNPRRGDVKLAQMAILLAEVDKVARLSDGSHCPIILCGDLNSVPDSPLYNFIRDGELQYHGMPAWKVSGQEDFSHQLYQRKLQAPLWPSSLGITDCCQYVTSCHPKRSERRKYGRDFLLRFRFCSIACQRPVGLVLMEGVTDTKPERPAGWAESVLEEDASELEPAFSRTVGTIQHCLHLTSVYTHFLPQRGRPEVTTMPLGLGMTVDYIFFSAESCENGNRTDHRLYRDGTLKLLGRLSLLSEEILWAANGLPNPFCSSDHLCLLASFGMEVTAP

SEQ ID NO: 1305 - protein, 228 aa, Homo sapiens
  SITE (164): Xaa equals any of the naturally occurring L-amino acids
  SITE (167): Xaa equals any of the naturally occurring L-amino acids
  SITE (200): Xaa equals any of the naturally occurring L-amino acids
  SITE (206): Xaa equals any of the naturally occurring L-amino acids
  SITE (221): Xaa equals any of the naturally occurring L-amino acids
MAAAGSVKAALQVAEVLEAIVSCCVGPEGRQVLCTKPTGEVLLSRNGGRLLEALHLEHPIARMIVDCVSSHLKKTGDGAKTFIIFLCHLLRGLHAITDREKDPLMCENIQTHGRHWKNCSRWKFISQALLTFQTQILDGIMDQYLSRHFLSIFSSAKERTLCRXSLXLLLEAYFCGKVGRNNHKFISQLMCDYFFKCMTXKSGIGXFELGDDHFVKLNVGXLAFLFKF

SEQ ID NO: 1306 - protein, 170 aa, Homo sapiens
MAAAGSVKAALQVAEVLEAIVSCCVGPEGRQVLCTKPTGEVLLSRNGGRLLEALHLEHPIARMIVDCVSSHLKKTGDGAKTFIIFLCHLLRGLHAITDREKDPLMCENIQTHGRHWKNCSRWKFISQALLTFQTQILDGIMDQYLSRHFLSIFSSAKERTLCRSSLESVS

SEQ ID NO: 1307 - protein, 149 aa, Homo sapiens
  SITE (87): Xaa equals any of the naturally occurring L-amino acids
  SITE (95): Xaa equals any of the naturally occurring L-amino acids
  SITE (107): Xaa equals any of the naturally occurring L-amino acids
MGAPLLSPGWGAGAAGRRWWMLLAPLLPALLLVRPAGALVEGLYCGTRDCYEVLGVSRSAGKAEIARAYRQLARRYHPDRYRPQPGXEGPGRTPXSAEEAFLLVATXYETLKDEETRKDYDYMLDHPEEYYSHYYHYYSRRLALRWMLE

SEQ ID NO: 1308 - protein, 360 aa, Homo sapiens
MGAPLLSPGWGAGAAGRRWWMLLAPLLPALLLVRPAGALVEGLYCGTRDCYEVLGVSRSAGKAEIARAYRQLARRYHPDRYRPQPGDEGPGRTPQSAEEAFLLVATAYETLKDEETRKDYDYMLDHPEEYYSHYYHYYSRRLAPKVDVRVVILVSVCAISVFQFFSWWNSYNKAISYLATVPKYRIQATEIAKQQGLLKKAKEKGKNKKSKEEIRDEEENIIKNIIKSKIDIKGGYQKPQICDLLLFQIILAPFHLCSYIVWYCRWIYNFNIKGKEYGEEERLYIIRKSMKMSKSQFDSLEDHQKETFLKRELWIKENYEVYKQEQEEELKKKLANDPRWKRYRRWMKNEGPGRLTFVDD

SEQ ID NO: 1309 - protein, 128 aa, Homo sapiens
  SITE (122): Xaa equals any of the naturally occurring L-amino acids
MESHLSTWPCHPSCCLFLILLFPSHPTSMTKSKARLPHLENCSQNDTSKPLGQARPPSSPTRTTDLTTGPTSSPAPLGILHTAVRVTHLHTLTLMGEEKAVFVARAQVGNLGLVFRKARGSXFPTLGR

SEQ ID NO: 1310 - protein, 112 aa, Homo sapiens
MESHLSTWPCHPSCCLFLILLFPSHPTSMTKSKARLPHLENCSQNDTSKPLGQARPPSSPTRTTDLTTGPTSSPAPLGILHTAVRVTHLHTLTLMGEEKAVFVARAQVGTLA

SEQ ID NO: 1311 - protein, 108 aa, Homo sapiens
MFVSVTAFFFSLLFLGMFLSGMVAQIDANWNFLDFAYHFTVFVFYFGAFLLEAAATSLHDLHCNTTITGQPLLSDNQYNINVAASIFAFMTTACYGCSLGLALRRWRP

SEQ ID NO: 1312 - protein, 77 aa, Homo sapiens
NHIQHKNYFWLNSTEKYFNLPVEILVMERCQTVLNGRTSKSEATVPTTRGLLYCSTFSALYFLAEASPWSAMYKLGY

SEQ ID NO: 1313 - protein, 108 aa, Homo sapiens
MFVSVTAFFFSLLFLGMFLSGMVAQIDANWNFLDFAYHFTVFVFYFGAFLLEAAATSLHDLHCNTTITGQPLLSDNQYNINVAASIFAFMTTAWYGCSLGLALRRWRP

SEQ ID NO: 1314 - protein, 176 aa, Homo sapiens
MSAGGASVPPPPNPAVSFPPPRVTLPAGPDILRTYSGAFVCLEILFGGLVWILVASSNVPLPLLQGWVMFVSVTAFFFSLLFLGMFLSGMVAQIDANWNFLDFAYHFTVFVFYFGAFLLEAAATSLHDLHCNTTITGQPLLSDNQYNINVAASIFAFMTTACYGCSLGLALRRWRP

SEQ ID NO: 1315 - protein, 103 aa, Homo sapiens
MPLCSLLTCLGLNVLFLTLNEGAWYSVGALMISVPALLGYLQEVCRARLPDSELMRRKYHSVRQEDLQRVRLSRPEAVAEVKSFLIQLEAFLKPPVLHMLKPP

SEQ ID NO: 1316 - protein, 237 aa, Homo sapiens
MPLCSLLTCLGLNVLFLTLNEGAWYSVGALMISVPALLGYLQEVCRARLPDSELMRRKYHSVRQEDLQRVRLSRPEAVAEVKSFLIQLEAFLSRLCCTCEAAYRVLHWENPVVSSQFYGALLGTVCMLYLLPLCWVLTLLNSTLFLGNVEFFRVVSEYRASLQQRMNPKQEEHAFESPPPPDVGGKDGLMDSTPALTPTEDLTPGSVEEAEEAEPDEEFKDAIDEDDEGAPCPALFL

SEQ ID NO: 1317 - protein, 165 aa, Homo sapiens
  SITE (54): Xaa equals any of the naturally occurring L-amino acids
  SITE (62): Xaa equals any of the naturally occurring L-amino acids
  SITE (64): Xaa equals any of the naturally occurring L-amino acids
  SITE (96): Xaa equals any of the naturally occurring L-amino acids
MARLGAVRSHYCALLLAAALAVCAFYYLGSGRETFSSATKRLKEARAGAPAAPXPPALELAXGXVAPAPGAKAKSLEGGGAGPVDYHLLMMFTKAXHNAALQAKARVALRSLLRLAKFEAHEVLNLHFVSEEASREVAKGLLRELLPPPLASSARSSSTICCADG

SEQ ID NO: 1318 - protein, 159 aa, Homo sapiens
ASKRMPAHHILTLGGCCTRILLMLTSLGVGFRIASLRKDFRTNWGLHKKTYLIIRVLTACISQLHPRTPLSFIPPNQLQVTRLYSESKFVIKEQRLATTRTCRRTVGTRKTHSKKPRPGTVVKPVIPTLWETEVGVSIEPRRSRSAWETQGGPHRYKIF

SEQ ID NO: 1319 - protein, 380 aa, Homo sapiens
MARLGAVRSHYCALLLAAALAVCAFYYLGSGRETFSSATKRLKEARAGAPAAPSPPALELARGSVAPAPGAKAKSLEGGGAGPVDYHLLMMFTKAEHNAALQAKARVALRSLLRLAKFEAHEVLNLHFVSEEASREVAKGLLRELLPPAAGFKCKVIFHDVAVLTDKLFPIVEAMQKHFSAGLGTYYSDSIFFLSVAMHQIMPKEILQIIQLDLDLKFKTNIRELFEEFDSFLPGAIIGIAREMQPVYRHTFWQFRHENPQTRVGGPPPEGLPGFNSGVMLLNLEAMRQSPLYSRLLEPAQVQQLADKYHFRGHLGDQDFFTMIGMEHPKLFHVLDCTWNRQLCTWWRDHGYSDVFEAYFRCEGHVKIYHGNCNTPIPED

SEQ ID NO: 1320 - protein, 73 aa, Homo sapiens
LESYSSVRELLVSVRFYVVCKVRGSVLFPYLGKSTAGVEGLYVPFNVTVLKDLSRESESFAECDRRLNNLICF

SEQ ID NO: 1321 - protein, 95 aa, Homo sapiens; identical to SEQ ID NO: 1190

SEQ ID NO: 1322 - protein, 234 aa, Homo sapiens; identical to SEQ ID NO: 1191

SEQ ID NO: 1323 - protein, 15 aa, Homo sapiens
NATKSQPCLSSLLLF

SEQ ID NO: 1324 - protein, 62 aa, Homo sapiens
  SITE (3): Xaa equals any of the naturally occurring L-amino acids
KYXKHPSKSFELTLVLRKLSLHNQPPGKTECHLLKSKCCVIITLQTKWRYYLFCKQQTKQNS

SEQ ID NO: 1325 - protein, 15 aa, Homo sapiens
NATKSQPCLSSLLLF

SEQ ID NO: 1326 - protein, 228 aa, Homo sapiens
  SITE (92): Xaa equals any of the naturally occurring L-amino acids
  SITE (134): Xaa equals any of the naturally occurring L-amino acids
  SITE (170): Xaa equals any of the naturally occurring L-amino acids
  SITE (195): Xaa equals any of the naturally occurring L-amino acids
  SITE (205): Xaa equals any of the naturally occurring L-amino acids
  SITE (209): Xaa equals any of the naturally occurring L-amino acids
  SITE (214): Xaa equals any of the naturally occurring L-amino acids
MVPNWIQGRWDVLLCVLTVGVLPSIGSRGGWFGTQVPCLIPGALASLHRGTALQLSYPFSMAGRTAERPCSMTNHSFHLLSIYWELGTVLSXKRVLTHLLQQPGKAGSSVSPCSKLGDLEHRRSSAWLKAHSSXVQILCPSWHPSLGGSGVGSLQSVPGGWMTKLQPSRXPTISIAQWSQKETDHFTDQRNKGAXLLNPGASDRXKPEXRTKKXPVNSEPGETLPFTN

SEQ ID NO: 1327 - protein, 84 aa, Homo sapiens
DNFLLGVAWFFRGRGSAHVGVVSRQKQWEEGTAKHAAWDYGCPQSCSFSKGVFCLFLRQGHTLSPRMECSGPILAHCNLELLGS

SEQ ID NO: 1328 - protein, 174 aa, Homo sapiens [sequence omitted]

SEQ ID NO: 1329 - protein, 115 aa, Homo sapiens
MVPNWIQGRWDVLLCVLTVGVLPSIGSRGGWFGTQVPCLIPGALASLHRGTALQLSYPFSMAGRTAERPCSMTNHSFHLLSIYWELGTVLSVKRVLTHLLQQPGKAVLPLAPAQS

SEQ ID NO: 1330 - protein, 59 aa, Homo sapiens
  SITE (54): Xaa equals any of the naturally occurring L-amino acids
  SITE (56): Xaa equals any of the naturally occurring L-amino acids
MENQMLTCVAIFVLFCFVLFLRQGLALSPRLECSGMIRAYCSLTLDFLGSSNPXTXAPK

SEQ ID NO: 1331 - protein, 59 aa, Homo sapiens
MENQMLTCVAIFVLFCFVLFLRQGLALSPRLECSGMIRAYCSLTLDFLGSSNPPTSAPK

SEQ ID NO: 1332 - protein, 100 aa, Homo sapiens
GSFLSPWGPILWGLGAGVLMGDALQGREGRMQATVGAGPEGSETVAVQVCVIREAVVGEEVSDCVAPLCGVGGQGGAAKEARKMGGGWDGLGSHIHVLDF

SEQ ID NO: 1333 - protein, 99 aa, Homo sapiens
MLILGSMFSLVEPVLTIAAALSVQSPFTRSAQSSPECAAARRPLESDQGDPFTLFNVFNAWVQVKSERSRNSRKWCRRRGIEEHRLYEMANFGASSRTV

SEQ ID NO: 1334 - protein, 163 aa, Homo sapiens [sequence omitted]

SEQ ID NO: 1335 - protein, 552 aa, Homo sapiens
  SITE (142): Xaa equals any of the naturally occurring L-amino acids
MLILGSMFSLVEPVLTIAAALSVQSPFTRSAQSSPECAAARRPLESDQGDPFTLFNVFNAWVQVKSERSRNSRKWCRRRGIEEHRLYEMANLRRQFKELLEDHGLLAGAQAAQVGDSYSRLQQRRERRALHQLKRQHEEGAXCRRKVLRLQEEQDGGSSDEDRAGPAPPGASDGVDIQDVKFKLRHDLAQLQAAASSAQDLSREQLALLKLVLGRGLYPQLAVPDAFNSSRKDSDQIFHTQAKQGAVLHPTCVFAGSPEVLHAQELEASNCDGSRDDKDKMSSKHQLLSFVSLLETNKPYLVNCVRIPALQSLLLFSRSLDTNGDCSRLVADGWLELQLADSESAIRLLAASLRLRARWESALDRQLAHQAQQQLEEEEEDTPVSPKEVATLSKELLQFTASKIPYSLRRLTGLEVQNMYVGPQTIPATPHLPGLFGSSTLSPHPTKGGYAVTDFLTYNCLTNDTDLYSDCLRTFWTCPHCGLHAPLTPLERIAHENTCPQAPQDGPPGAEEAALETLQKTSVLQRPYHCEACGKDFLFTPTEVLRHRKQHV

SEQ ID NO: 1336 - protein, 78 aa, Homo sapiens
MSLYGTRWRISWPHWRRVVLVSLLSSSGGQISPSLSHHLPCSDFFELETSLALFWLTTLVPSITNITRVFTTLLRTLM

SEQ ID NO: 1337 - protein, 78 aa, Homo sapiens; identical to SEQ ID NO: 1336

SEQ ID NO: 1338 - protein, 159 aa, Homo sapiens
MGCLWGLALPLFFFCWEVGVSGSSAGPSTRRADTAMTTDDTEVPAMTLAPGHAALETQTLSAETSSRASTPAGPIPEAETRGAKRISPARETRSFTKTSPNFMVLIATSVETSAASGSPEGARMTTVQTITGSDPRKPSLTPFAPMTALKRQRHSQWTY

SEQ ID NO: 1339 - protein, 149 aa, Homo sapiens
  SITE (114): Xaa equals any of the naturally occurring L-amino acids
  SITE (123): Xaa equals any of the naturally occurring L-amino acids
  SITE (144): Xaa equals any of the naturally occurring L-amino acids
MGCLWGLALPLFFFCWEVGVSGSSAGPSTRRADTAMTTDDTEVPAMTLAPGHAALETQTLSAETSSRASTPAGPIPEAETRGAKRISPARETRSFTKTSPNFMVLIATSVETSXASGSPEGAXMTTVQTITGSDPREAIFDTLXTDDSS

SEQ ID NO: 1340 - protein, 595 aa, Homo sapiens
MGCLWGLALPLFFFCWEVGVSGSSAGPSTRRADTAMTTDDTEVPAMTLAPGHAALETQTLSAETSSRASTPAGPIPEAETRGAKRISPARETRSFTKTSPNFMVLIATSVETSAASGSPEGARMTTVQTITGSDPREAIFDTLCTDDSSEEAKTLTMDILTLAHTSTEAKGLSSESSASSDGPHPVITPSRASESSASSDGPHPVITPSRASESSASSDGPHPVITPSRASESSASSDGPHPVITPSRASESSASSDGPHPVITPSRASESSASSDGPHPVITPSWSPGSDVTLLAEALVSVTNIEVINCSITEIETTTSSIPGASDTDLIPTEGVKASSTSDPPALPDSTEAKPHITEVTASAETLSTAGTTESAAPDATVGTPLPTNSATEREVTAPGATTLSGALVTVSRNPLEETSALSVETPSYVKVSGAAPVSIEAGSAVGKTTSFAGSSASSYSPSEAALKNFTPSETPTMDIATKGPFPTSRDPLPSVPPTTTNSSRGTNSTLAKITTSAKTTMKPPTATPTTARTRPTTDVSAGENGGFLLLRLSVASPEDLTDPRVAERLMQQLHRELHAHAPHFQVSLLRVRRG

SEQ ID NO: 1341 - protein, 114 aa, Homo sapiens
MWNPWIAMCLLGLSYSLLACALWPMVAFVVPEHQLGTAYGFMQSIQNLGLAIISIIAGMILDSRGYLFLEVFFIACVSLSLLSVVLLYLVNRAQGGNLNYSARQREEIKFSHTE

SEQ ID NO: 1342 - protein, 114 aa, Homo sapiens; identical to SEQ ID NO: 1341

SEQ ID NO: 1343 - protein, 114 aa, Homo sapiens; identical to SEQ ID NO: 1341

SEQ ID NO: 1344 - protein, 465 aa, Homo sapiens
MEEEDEEARALLAGGPDEADRGAPAAPGALPALCDPSRLAHRLLVLLLMCFLGFGSYFCYDNPAALQTQVKRDMQVNTTKFMLLYAWYSWPNVVLCFFGGFLIDRVFGIRWGTIIFSCFVCIGQVVFALGGIFNAFWLMEFGRFVFGIGGESLAVAQNTYAVSWFKGKELNLVFGLQLSMARIGSTVNMNLMGWLYSKIEALLGSAGHTTLGITLMIGGITCILSLICALALAYLDQRAERILHKEQGKTGEVIKLTDVKDFSLPLWLIFIICVCYYVAVFPFIGLGKVFFTEKFGFSSQAASAINSVVYVISAPMSPVFGLLVDKTGKNIIWVLCAVAATLVSHMMLAFTMWNPWIAMCLLGLSYSLLACALWPMVAFVVPEHQLGTAYGFMQSIQNLGLAIISIIAGMILDSRGYLFLEVFFIACVSLSLLSVVLLYLVNRAQGGNLNYSARQREEIKFSHTE

SEQ ID NO: 1345 - protein, 83 aa, Homo sapiens
MGLKALPEPFMSLVSHLLRTFFLVWFVGLPVAILGNLLECYANVFTGNGGGPEPWGGHLVSECLALPQLGIQYLALSGGIIWL

SEQ ID NO: 1346 - protein, 73 aa, Homo sapiens [sequence omitted]

SEQ ID NO: 1347 - protein, 83 aa, Homo sapiens; identical to SEQ ID NO: 1345

SEQ ID NO: 1348 - protein, 111 aa, Homo sapiens
MFLARVPFLFTIVPFSVLRSMLSKVVRSTEQGTLFACIAFLETLGGVTAVSTFNGIYSATVAWYPGFTFLLSAGLLLLPAISLCVVKCTSWNEGSYELLIQEESSEDASDR

SEQ ID NO: 1349 - protein, 111 aa, Homo sapiens; identical to SEQ ID NO: 1348

SEQ ID NO: 1350 - protein, 230 aa, Homo sapiens
MSCSEGFKNLFYRTYMLFKNASGKRRFLLCLLLFTVITYFFVVIGIAPIFILYELDSPLCWNEVFIGYGSALGSASFLTSFLGIWLFSYCMEDIHMAFIGIFTTMTGMAMTAFASTTLMMFLARVPFLFTIVPFSVLRSMLSKVVRSTEQGTLFACIAFLETLGGVTAVSTFNGIYSATVAWYPGFTFLLSAGLLLLPAISLCVVKCTSWNEGSYELLIQEESSEDASDR

SEQ ID NO: 1351 - protein, 137 aa, Homo sapiens
  SITE (111): Xaa equals any of the naturally occurring L-amino acids
  SITE (116): Xaa equals any of the naturally occurring L-amino acids
  SITE (123): Xaa equals any of the naturally occurring L-amino acids
MYLQVETRTSSRLHLKRAPGIRSWSLLVGILSIGLAAAYYSGDSLGWKLFYVTGCLFVAVQNLEDWEEAIFDKSTGKVVLKTFSLYKKLLTLFRAGHDQVVVLLHDVRDVXVEEEXVRYFGKXYMVVLRLATGFFHP

SEQ ID NO: 1352 - protein, 124 aa, Homo sapiens
MYLQVETRTSSRLHLKRAPGIRSWSLLVGILSIGLAAAYYSGDSLGWKLFYVTGCLFVAVQNLEDWEEAIFDKSTGKVVLKTFSLYKKLLTLFRAGHDQVVVLLHDVRSGCQSLVAGQGHHNHK

SEQ ID NO: 1353 - protein, 145 aa, Homo sapiens
  SITE (123): Xaa equals any of the naturally occurring L-amino acids
  SITE (135): Xaa equals any of the naturally occurring L-amino acids
  SITE (137): Xaa equals any of the naturally occurring L-amino acids
MYLQVETRTSSRLHLKRAPGIRSWSLLVGILSIGLAAAYYSGDSLGWKLFYVTGCLFVAVQNLEDWEEAIFDKSTGKVVLKTFSLYKKLLTLFRAGHDQVVVLLHDVRDVSVEEEKVRYFGKXYMVVLRLATGFXHXLTQSADMG

SEQ ID NO: 1354 - protein, 89 aa, Homo sapiens
  SITE (24): Xaa equals any of the naturally occurring L-amino acids
  SITE (75): Xaa equals any of the naturally occurring L-amino acids
MFKDYPPAIKPSYDVLLLLLLLVXLLQAGLNTGTAIQCVRFKVSARLQGASWDTQNGPQERLAGEVARSPLKEFXKEKAWRAVVVQMAQ

SEQ ID NO: 1355 - protein, 89 aa, Homo sapiens
MFKDYPPAIKPSYDVLLLLLLLVLLLQAGLNTGTAIQCVRFKVSARLQGASWDTQNGPQERLAGEVARSPLKEFDKEKAWRAVVVQMAQ

SEQ ID NO: 1356 - protein, 419 aa, Homo sapiens
MNNQKQQKPTLSGQRFKTRKRDEKERFDPTQFQDCIIQGLTETGTDLEAVAKFLDASGAKLDYRRYAETLFDILVAGGMLAPGGTLADDMMRTDVCVFAAQEDLETMQAFAQVFNKLIRRYKYLEKGFEDEVKKLLLFLKGFSESERNKLAMLTGVLLANGTLNASILNSLYNENLVKEGVSAAFAVKLFKSWINEKDINAVAASLRKVSMDNRLMELFPANKQSVEHFTKYFTEAGLKELSEYVRNQQTIGARKELQKELQEQMSRGDPFKDIILYVKEEMKKNNIPEPVVIGIVWSSVMSTVEWNKKEELVAEQAIKHLKQYSPLLAAFTTQGQSELTLLLKIQEYCYDNIHFMKAFQKIVVLFYKAEVLSEEPILKWYKDAHVAKGKSVFLEQMKKFVEWLKNAEEESESEAEEGD

SEQ ID NO: 1357 - protein, 19 aa, Homo sapiens
TIACMLTFCFVLFCFVLHF

SEQ ID NO: 1358 - protein, 857 aa, Homo sapiens
MSYYMADRKHRKAFLEARQSLEVKMNLEEQSQQQENLMLSILPKHVADEMLKDMKKDESQKDQQQFNTMYMYRHENVSILFADIVGFTQLSSACSAQELVKLLNELFARFDKLAAKYHQLRIKILGDCYYCICGLPDYREDHAVCSILMGLAMVEAISYVREKTKTGVDMRVGVHTGTVLGGVLGQKRWQYDVWSTDVTVANKMEAGGIPGRVHISQSTMDCLKGEFDVEPGDGGSRCDYLEEKGIETYLIIASKPEVKKTATQNGLNGSALPNGAPASSKSSSPALIETKEPNGSAHSSGSTSEKPEEQDAQADNPSFPNPRRRLRLQDLADRVVDASEDEHELNQLLNEALLERESAQVVKKRNTFLLSMRFMDPEMETRYSVEKEKQSGAAFSCSCVVLLCTALVEILIDPWLMTNYVTFMVGEILLLILTICSLAAIFPRAFPKKLVAFSTWIDRTRWARNTWAMLAIFILVMANVVDMVSHMVKLTLMLLVAGAVATINLYAWRPVFDEYDHKRFREHDLPMVALEQMQGFNPGLNGTDRLPLVPSKYSMTVMVFLMMLSFYYFSRHVEKLARTLFLWKIEVHDQKERVYEMRRWNEALVTNMLPEHVARHFLGSKKRDEELYSQTYDEIGVMFASLPNFADFYTEESINNGGIECLRFLNEIISDFDSLLDNPKFRVITKIKTIGSTYMAASGVTPDVNTNGFASSNKEDKSERERWQHLADLADFALAMKDTLTNINNQSFNNFMLRIGMNKGGVLAGVIGARKPHYDIWGNTVNVASRMESTGVMGNIQVVEETQVILREYGFRFVRRGPIFVKGKGELLTFFLKGRDKLATFPNGPSVTLPHQVVDNS

SEQ ID NO: 1359 - protein, 188 aa, Homo sapiens
MVPGAAGWCCLVLWLPACVAAHGFRIHDYLYFQVLSPGDIRYIFTATPAKDFGGIFHTRYEQIHLVPAEPPEACGELSNGFFIQDQIALVERGGCSFLSKTRVVQEHGGRAVIISDNAVDNDSFYVEMIQDSTQRTADIPALFLLGRDGYMIRRSLEQHGLPWAIISIPVNVTSIPTFELLQPPWTFW

SEQ ID NO: 1360 - protein, 188 aa, Homo sapiens; identical to SEQ ID NO: 1359

SEQ ID NO: 1361 - protein, 116 aa, Homo sapiens
  SITE (28): Xaa equals any of the naturally occurring L-amino acids
  SITE (90): Xaa equals any of the naturally occurring L-amino acids
MRKIHTPLFNLLQVRLGFVYFPCFTFPXVQAVVETGTQGLCVAPCSSCLQEACGALVSLASCPPFLLPPLTLPPTLSLRTSSWKGLARAXVLASLWGGRLCGLKGCRLKLQGVGAW

SEQ ID NO: 1362 - protein, 167 aa, Homo sapiens [sequence omitted]

SEQ ID NO: 1363 - protein, 286 aa, Homo sapiens
  SITE (204): Xaa equals any of the naturally occurring L-amino acids
  SITE (224): Xaa equals any of the naturally occurring L-amino acids
  SITE (228): Xaa equals any of the naturally occurring L-amino acids
  SITE (264): Xaa equals any of the naturally occurring L-amino acids
  SITE (271): Xaa equals any of the naturally occurring L-amino acids
MYLSALQSLIPSLFALVLQNAPFSSKAKLHGEVPQIEVTRFPRPMSPLQDVSTIIGSREQLAVLLQLYDYQLEQEGTTGWESLLWVVNQLLPQLIEIVGKINVTSTACVHEFSRFFWRLCRTFGKIFTNTKVKPQFQEILRLSEENIDSSAGNGVLTKATVPIYATGVLTCYIQEEDRKLLVGFLEDVMTLLSLSHAPLDSLKXSFVELGANQAYHELLLTVLXYGVXHTSALVRCTAARMFELLVKGVNETLVAQRVVPALHXLSPVDPXNLCQDCHNFQPLGLF

SEQ ID NO: 1364 - protein, 283 aa, Homo sapiens
MYLSALQSLIPSLFALVLQNAPFSSKAKLHGEVPQIEVTRFPRPMSPLQDVSTIIGSREQLAVLLQLYDYQLEQEGTTGWESLLWVVNQLLPQLIEIVGKINVTSTACVHEFSRFFWRLCRTFGKIFTNTKVKPQFQEILRLSEENIDSSAGNGVLTKATVPIYATGVLTCYIQEEDRKLLVGFLEDVMTLLSLSHAPLDSLKASFVELGANPAYHELLLTVLWYGVVHTSALVRCTAARMFEVCQHMPLLVSIIMIFFFLRRRREFFLIKRLCISKKKKKKK

SEQ ID NO: 1365 - protein, 379 aa, Homo sapiens
  SITE (283): Xaa equals any of the naturally occurring L-amino acids
  SITE (303): Xaa equals any of the naturally occurring L-amino acids
  SITE (307): Xaa equals any of the naturally occurring L-amino acids
MGYIDDPDKYHQGFELLLSALGDPSERVVSATHQVFLPAYAAWTTELGNLQSHLILTLLNKIEKLLREGEHGLDEHKLHMYLSALQSLIPSLFALVLQNAPFSSKAKLHGEVPQIEVTRFPRPMSPLQDVSTIIGSREQLAVLLQLYDYQLEQEGTTGWESLLWVVNQLLPQLIEIVGKINVTSTACVHEFSRFFWRLCRTFGKIFTNTKVKPQFQEILRLSEENIDSSAGNGVLTKATVPIYATGVLTCYIQEEDRKLLVGFLEDVMTLLSLSHAPLDSLKXSFVELGANQAYHELLLTVLXYGVXHTSALVRCTAARMFELLVKGVNETLVAQRVVPALITLSSDPEISVRIATIPAFGTIMETVIQRELLERVKMQ

SEQ ID NO: 1366 - protein, 156 aa, Homo sapiens
MPALLPVASRLLLLPRVLLTMASGSPPTQPSPASDSGSGYVPGSVSAAFVTCPNEKVAKEIARAVVEKRLAACVNLIPQITSIYEWKGKIEEDSEVLMMIKTQSSLVPALTDFVRSVHPYEVAEVIALPVEQGNFPYLQWVRQVTESVSDSITVLP

SEQ ID NO: 1367 - protein, 156 aa, Homo sapiens; identical to SEQ ID NO: 1366

SEQ ID NO: 1368 - protein, 442 aa, Homo sapiens
  SITE (164): Xaa equals any of the naturally occurring L-amino acids
  SITE (247): Xaa equals any of the naturally occurring L-amino acids
MWRLPGLLGRALPRTLGPSLWRVTPKSTSPDGPQTTSSTLLVPVPNLDRSGPHGPGTSGGPRSHGWKDAFQWMSSRVSPNTLWDAISWGTLAVLALQLARQIHFQASLPAGPQRVEHCSWHSPLDRFFSSPLWHPCSSLRQHILPSPDGPAPRHTGLREPRLGXEEASAQPRNFSHNSLRGARPQDPSEEGPGDFGFLHASSSIESEAKPAQPQPTGEKEQDKSKTLSLEEAVTSIQQLFQLSVSIXFNFLGTENMKSGDHTAAFSYFQKAAARGYSKAQYNAGLCHEHGRGTPRDISKAVLYYQLAASQGHSLAQYRYARCLLRDPASSWNPERQRAVSLLKQAADSGLREAQAFLGVLFTKEPYLDEQRAVKYLWLAANNGDSQSRYHLGICYEKGLGVQRNLGEALRCYQQSAALGNEAAQERLRALFSMGAAAGGPAT

SEQ ID NO: 1369 - protein, 84 aa, Homo sapiens
MGLRLPPPLCWFLCLTSTGQVPMAQARAGVQGPMDGRMPSNGCLPVSPRTPYGMPYLGALWPCWPCSWQGRSTSRHPCQQDLSG

SEQ ID NO: 1370 - protein, 129 aa, Homo sapiens [sequence omitted]

SEQ ID NO: 1371 - protein, 53 aa, Homo sapiens
  SITE (1): Xaa equals any of the naturally occurring L-amino acids
  SITE (2): Xaa equals any of the naturally occurring L-amino acids
  SITE (52): Xaa equals any of the naturally occurring L-amino acids
  SITE (53): Xaa equals any of the naturally occurring L-amino acids
XXDTQGRVRGRHEEWGGRRWRKEGSEQRAPGMAWKRLSPWILWVGASGLTSXX

SEQ ID NO: 1372 - protein, 129 aa, Homo sapiens [sequence omitted]

SEQ ID NO: 1373 - protein, 117 aa, Homo sapiens
  SITE (114): Xaa equals any of the naturally occurring L-amino acids
MGFLFLLGLYISSLASCMGGLYGAPRILQCIAQEKVIPALACLGQGKGPNKTPVAAICLTSLVTMAFVFVGQVNVLAPIVTINFMLTYVAVDYSYFSLSMCSCSLTPVPEPVLXEGA

SEQ ID NO: 1374 - protein, 98 aa, Homo sapiens
  SITE (85): Xaa equals any of the naturally occurring L-amino acids
  SITE (90): Xaa equals any of the naturally occurring L-amino acids
  SITE (97): Xaa equals any of the naturally occurring L-amino acids
QGTPRLCTTRLLVQRATISVCFIFYCIIYSKINNTLTCFHTQKIYRVKSLPPILILHLLSSCLPWPRGNHYSHPYIQHFFMDIQXNGNVXSHISLFXP

SEQ ID NO: 1375 - protein, 407 aa, Homo sapiens
  SITE (114): Xaa equals any of the naturally occurring L-amino acids
MGFLFLLGLYISSLASCMGGLYGAPRILQCIAQEKVIPALACLGQGKGPNKTPVAAICLTSLVTMAFVFVGQVNVLAPIVTINFMLTYVAVDYSYFSLSMCSCSLTPVPEPVLXEGAEGLHCSEHLLLEKAPSYGSEGPAQRVLEGTLLEFTKDMDQLLQLTRKLESSQPRQGEGNRTPESQKRKSKKATKQTLQDSFLLDLKSPPSFPVEISDRLPAASWEGQESCWNKQTSKSEGTQPEGTYGEQLVPELCNQSESSGEDFFLKSRLQEQDVWRRSTSFYTHMCNPWVSLLGAVGSLLIMFVIQWVYTLVNMGVAAIVYFYIGRASPGLHLGSASNFSFFRWMRSLLLPSCRSLQSPQEQIILAPSLAKVDMEMTQLTQENADFATRDRYHHSSLVNREQLMPHY

SEQ ID NO: 1376 - protein, 137 aa, Homo sapiens
MLSGRLVLGLVSMAGRVCLCQGSAGSGAIGPVEAAIRTKLEEALSPEVLELRNESGGHAVPPGSETHFRVAVVSSRFEGLSPLQRHRLVHAALAEELGGPVHALAIQARTPAQWRENSQLDTSPPCLGGNKKTLGTP

SEQ ID NO: 1377 - protein, 143 aa, Homo sapiens
  SITE (19): Xaa equals any of the naturally occurring L-amino acids
  SITE (47): Xaa equals any of the naturally occurring L-amino acids
  SITE (58): Xaa equals any of the naturally occurring L-amino acids
  SITE (104): Xaa equals any of the naturally occurring L-amino acids
FGPAVFGFGSPRGKPPGNXRGGPIRVPGFGRPRPISAPEVWEGRPLXAPRSCFRNFRXRRSGGHAVPPGSETHFRVAVVSSRFEGLSPLQRHRLVHAALAEELXGPVHALAIQARTPAQWRENSQLDTSPPCLGGNKKTLGTP

SEQ ID NO: 1378 - protein, 137 aa, Homo sapiens; identical to SEQ ID NO: 1376

SEQ ID NO: 1379 - protein, 82 aa, Homo sapiens
  SITE (17): Xaa equals any of the naturally occurring L-amino acids
MIRRLVFAAFPRLFPVXLPSMLTHWASLAVIPTMTATSVGKAPPGPLPDASPSLRLPARRRPDPVGACRGVRGMADLMVPLP

SEQ ID NO: 1380 - protein, 254 aa, Homo sapiens
  SITE (176): Xaa equals any of the naturally occurring L-amino acids
  SITE (210): Xaa equals any of the naturally occurring L-amino acids
  SITE (214): Xaa equals any of the naturally occurring L-amino acids
  SITE (237): Xaa equals any of the naturally occurring L-amino acids
  SITE (246): Xaa equals any of the naturally occurring L-amino acids
EFGTSLKVRGFILEVSETTNPPEGTNSGHSGMVSALCGLCLLGSNDSPASASQVAGTTGLSKSLGLIEGYGGRGKGGLPATLSPAEEEKAKGPHEKYGYNSYLSEKISLDRSIPDYRPTKCKELKYSKDLPQISIIFIFVNEALSVILRSVHSAVNHTPTHLLKEIILVDDNSDEXELKVPLEEYVHKRYPGLVKVVRNQKRESLIRARXEGWXVATGQVTGFFDAPRGIHRLLGLXRVYPDPGKXRKRGNLPL

SEQ ID NO: 1381 - protein, 74 aa, Homo sapiens [sequence omitted]

SEQ ID NO: 1382 - protein, 273 aa, Homo sapiens
MVSALCGLCLLGSNDSPASASQVAGTTGLSKSLGLIEGYGGRGKGGLPATLSPAEEEKAKGPHEKYGYNSYLSEKISLDRSIPDYRPTKCKELKYSKDLPQISIIFIFVNEALSVILRSVHSAVNHTPTHLLKEIILVDDNSDEEELKVPLEEYVHKRYPGLVKVVRNQKREGLIRARIEGWKVATGQVTGFFDAHVEFTAGWAEPVLSRIQENRKRVILPSIDNIKQDNFEVQRYENSAHGYSWELWCMYISPPKDWWDAGDPSLPISDRFS

SEQ ID NO: 1383 - protein, 238 aa, Homo sapiens
MQQGPKEFIECVSHIRLLSWLLLGSLTHNAVCPNASSPCLPIPLDAGSHVADHLIVILIGFPEQSKTSVLHMCSLFHAFIFAQLWTVYCEQSAVATNLQNQNEFSFTAILTALEFWSRVTPSILQLMAHNKVMVEMVCLHVISLMEALQECNSTIFVKLIPMWLPMIQSNIKHLSAGLQLRLQAIQNHVNHHSLRTLPGSGQSSAGLAALRKWLQCTQFKMAQVEIQSSEAASQFYPL

SEQ ID NO: 1384 - protein, 227 aa, Homo sapiens
HELKVGLAQIAAMDISRGNHRDNKAVIRYLPWLYHPPSAMQQGPKEFIECVSHIRLLSWLLLGSLTHNAVCPNASSPCLPIPLDAGSHVADHLIVILIGFPEQSKTSVLHMCSLFHAFIFAQLWTVYCEQSAVATNLQNQNEFSFTAILTALEFWSRVTPSILQLMAHNKVMVEMVCLHVISLMEALQECNSTIFVKLIPMWLPMIQSNIKHLSAGLQFASRLFRTT

SEQ ID NO: 1385 - protein, 85 aa, Homo sapiens
MSTCCTSALQYLLALFPLPAPNCVSYRSQGSSCYLLLQIQKPRLREEPEWPQPQSKSMRGSMKLGFFPHCTRLLPSWGGGGRCSG

SEQ ID NO: 1386 - protein, 110 aa, Homo sapiens
  SITE (20): Xaa equals any of the naturally occurring L-amino acids
LLGCTKIGGRSDLAGPWVRXRSLEPTCVGMNPGSAGCPLVSGSTSLCFRVLIYKMGMMMMILWGCNMVQSHWKSLAVPQKVKHKSYHMIQVWQHIPVVPATQEDHLSPGV

SEQ ID NO: 1387 - protein, 85 aa, Homo sapiens; identical to SEQ ID NO: 1385

SEQ ID NO: 1388 - protein, 261 aa, Homo sapiens [sequence omitted]

SEQ ID NO: 1389 - protein, 72 aa, Homo sapiens
IVNPMFCNFHFRSLTYFFLSHKNTFVLIVGEIFSAFCMFFLIFVGLNILVVITVIIQQKAYPFKNFSTMSFF

SEQ ID NO: 1390 - protein, 261 aa, Homo sapiens [sequence omitted]

SEQ ID NO: 1391 - protein, 98 aa, Homo sapiens
MHLHVSVSLIWGLLSFLSLQVCVFVGSSQPLLLQCVSGPAPFLLSLGVRHQPFWDCPTGPSREETRLNPRALTRPRQTCWSFGWQVALRPSEKSPCFS

SEQ ID NO: 1392 - protein, 98 aa, Homo sapiens; identical to SEQ ID NO: 1391

SEQ ID NO: 1393 - protein, 139 aa, Homo sapiens
  SITE (14): Xaa equals any of the naturally occurring L-amino acids
  SITE (116): Xaa equals any of the naturally occurring L-amino acids
  SITE (139): Xaa equals any of the naturally occurring L-amino acids
MALYELFSHPVERXYRAGLCSKAALFLLLAAALTYIPPLLVAFRSHGFWLKRTATRSSRPCASNTRCCSWPCSDPKATGSSPGARSPPSTGCKGIACASRSFRGGDNACCVKQDSXSLCIYRSDVDSSQNSLVTKGAGX

SEQ ID NO: 1394 - protein, 316 aa, Homo sapiens
MALYELFSHPVERSYRAGLCSKAALFLLLAAALTYIPPLLVAFRSHGFWLKRSSYEEQPTVRFQHQVLLVALLGPESDGFLAWSTFPAFNRLQGDRLRVPLVSTREEDRNQDGKTDMLHFKLELPLQSTEHVLGVQLILTFSYRLHRMATLVMQSMAFLQSSFPVPGSQLYVNGDLRLQQKQPLSCGGLDARYNISVINGTSPFAYDYDLTHIVAAYQERNVTTVLNDPNPIWLVGRAADAPFVINAIIRYPVEVISYQPGFWEMVKFAWVQYVSILLIFLWVFERIKIFVFQNQVVTTIPVTVTPRGDLCKEHLS

SEQ ID NO: 1395 - protein, 103 aa, Homo sapiens
  SITE (77): Xaa equals any of the naturally occurring L-amino acids
MAFLLERSGTLLICSMWWHHGYSNITGTEGERRNLKRNKTNFRRFQDGRIGTAPVYSSQCERCRRWVISAFPTEQTXHQKIISHAWLGGSHAHGASLIASTAV

SEQ ID NO: 1396 - protein, 103 aa, Homo sapiens
MAFLLERSGTLLICSMWWHHGYSNITGTEGERRNLKRNKTNFRRFQDGRIGTAPVYSSQCERCRRWVISAFPTEQTAHQKIISHAWLGGSHAHGASLIASTAV

SEQ ID NO: 1397 - protein, 125 aa, Homo sapiens
MCVWFCLFACLFACLFFETESHSVAQAGVQWLDLSSLQQPPPPGFKCFSCLCLLSSWDYRRACHHTRIIFVFLVEMGFHHVDQADLELLTSSDPPALASRSAGITGVSHHTPPACLVFKFLFLGS

SEQ ID NO: 1398 - protein, 112 aa, Homo sapiens
  SITE (91): Xaa equals any of the naturally occurring L-amino acids
  SITE (106): Xaa equals any of the naturally occurring L-amino acids
APVLLLPSSCWQFWVLGFFFFRQSLTPSPGWKYSGAVSAHCSLRLPGSNDPLASASQLAGTTGAHHHGQLIFVFLVEMGFHHIAQAGLKLXTSSDLLTSAFQSAGXIYILNK

SEQ ID NO: 1399 - protein, 125 aa, Homo sapiens [sequence omitted]

SEQ ID NO: 1400 - protein, 79 aa, Homo sapiens [sequence omitted]

SEQ ID NO: 1401 - protein, 455 aa, Homo sapiens
  SITE (1): Xaa equals any of the naturally occurring L-amino acids
  SITE (17): Xaa equals any of the naturally occurring L-amino acids
  SITE (103): Xaa equals any of the naturally occurring L-amino acids
  SITE (178): Xaa equals any of the naturally occurring L-amino acids
XTGQRCENLLEERNCSXPGGPVNGYQKITGGPGLINGRHAKIGTVVSFFCNNSYVLSGNEKRTCQQNGEWSGKQPICIKACREPKISDLVRRRVLPMQVQSRXTPLHQLYSAAFSKQKLQSAPTKKPALPFGDLPMGYQHLHTQLQYECISPFYRRLGSSRRTCLRTGKWSGRAPSCXPICGKIENITAPKTQGLRWPWQAAIYRRTSGVHDGSLHKGAWFLVCSGALVNERTVVVAAHCVTDLGKVTMIKTADLKVVLGKFYRDDDRDEKTIQSLQISAIILHPNYDPILLDADIAILKLLDKARISTRVQPICLAASRDLSTSFQESHITVAGWNVLADVRSPGFKNDTLRSGVVSVVDSLLCEEQHEDHGIPVSVTDNMFCASWEPTAPSDICTAETGGIAAVSFPGRASPEPRWHLMGLVSWSYDKTCSHRLSTAFTKVLPFKDWIERNMK

SEQ ID NO: 1402 - protein, 323 aa, Homo sapiens
  SITE (283): Xaa equals any of the naturally occurring L-amino acids
  SITE (296): Xaa equals any of the naturally occurring L-amino acids
  SITE (298): Xaa equals any of the naturally occurring L-amino acids
MELGCWTQLGLTFLQLLLISSLPREYTVINEACPGAEWNIMCRECCEYDQIECVCPGKREVVGYTIPCCRNEENECDSCLIHPGCTIFENCKSCRNGSWGGTLDDFYVKGFYCAECRAGWYGGDCMRCGQVLRAPKGQILLESYPLNAHCEWTIHAKPGFVIQLRFVMLSLEFDYMCQYDYVEVRDGDNRDGQIIKRVCGNERPAPIQSIGSSLHVLFHSDGSKNFDGFHAIYEEITACSSSPCFHDGTCVLDKAGSYKCACLAGYTGQRCENLLEAGKSKIXASEDSLSVLEERXCXDPGGPVNGYQKITGGPGLINGRHAK

SEQ ID NO: 1403 - protein, 80 aa, Homo sapiens [sequence omitted]

SEQ ID NO: 1404 - protein, 121 aa, Homo sapiens
  SITE (114): Xaa equals any of the naturally occurring L-amino acids
KLRLREVKSIAQGHVARIWQSHDSDPGLLILIPVSFLAYHVASKDCSSLFTRKLFLPNLHLHLTPSFLKHYVCVFISIIFIVFGIHVLVCVWKKNLFYQLALGPTWKKKSLNVXAMYSLKM

SEQ ID NO: 1405 - protein, 80 aa, Homo sapiens [sequence omitted]

SEQ ID NO: 1406 - protein, 83 aa, Homo sapiens
  SITE (82): Xaa equals any of the naturally occurring L-amino acids
IWMHFISFLYPIALATTSSTVLNRSGECGHPCLVPVLRENAFSLSPFGMMFAVGLSYMAFFTLRYVPSVPILLRVFIIQECXF

SEQ ID NO: 1407 - protein, 94 aa, Homo sapiens
MHFISFLYPIALATTSSTVLNRSGECGHPCLVPVLRENAFSLSPFGMMFAVGLSYMAFFTLRYVPSVPILLRVFIIQECWILSNAFSASGEMII

SEQ ID NO: 1408 - protein, 94 aa, Homo sapiens; identical to SEQ ID NO: 1407

SEQ ID NO: 1409 - protein, 95 aa, Homo sapiens
MILIRKLFLRRCHWGGWLLPPARASCSGKHSLSHSCRGPRVQRPPHPRFWAGTLAPGPCPGLWCLPGLVQVDVLAAGRCDHLSCLPPLCPQAFLL

SEQ ID NO: 1410 - protein, 92 aa, Homo sapiens
MPGCVFCFLTLLFHSLSVGQYCCLICVCFVLYVYTQIHTRIHIHTHKHFFFPWRQGIALSPRLEYSSAIMTHRLIAALASQAQAILPPQPSE

SEQ ID NO: 1411 - protein, 225 aa, Homo sapiens
  SITE (66): Xaa equals any of the naturally occurring L-amino acids
  SITE (101): Xaa equals any of the naturally occurring L-amino acids
MIHVRHCTPIPALLVCCGATAVIMLVGDTYTLINYVSFINYLCYGVTILGLLLLRWRRPALHRPIXVNLLIPVAYLVFWAFLLVFSFISEPMVCGVGVIIXLTGVPIFFLGVFWRSKPKCVHRLTESMTHWGQELCFVVYPQDAPEEEENAPAHPPCCLPQTSPRSHNEIFVETEAVVSVYMLFIEEVFWQKSFVLFFSGKKRKKIRLSEACFKEALKCGLGFLS

SEQ ID NO: 1412 - protein, 172 aa, Homo sapiens
MIHVRHCTPIPALLVCCGATAVIMLVGDTYTLINYVSFINYLCYGVTILGLLLLRWRRPALHRPIKVNLLIPVAYLVFWAFLLVFSFISEPMVCGVGVIIILTGVPIFFLGVFWRSKPKCVHRLTESMTHWGQELCFVVYPQDAPEEEEEWPLPTLPAACHRQALEATMRFL

SEQ ID NO: 1413 - protein, 225 aa, Homo sapiens; identical to SEQ ID NO: 1411
  SITE (66): Xaa equals any of the naturally occurring L-amino acids
  SITE (101): Xaa equals any of the naturally occurring L-amino acids

SEQ ID NO: 1414 - protein, 67 aa, Homo sapiens
  SITE (12): Xaa equals any of the naturally occurring L-amino acids
KDKCILLKRQSXTHEEQCKLKPNQRLGVAAMPVIPALWEAEVGRLLEIRSLSLGNIVKPCLYKKYKN

SEQ ID NO: 1415 - protein, 587 aa, Homo sapiens; identical to SEQ ID NO: 346

SEQ ID NO: 1416 - protein, 157 aa, Homo sapiens
MRPRGLPPLLVVLLGCWASVSAQTDATPAVTTEGLNSTEAALATFGTFPSTRPPGTPRAPGPSSGPRPTPVTDVAVLCVCDLSPAQCDINCCCDPDCSSVDFSVFSACSVPVVTGDSQFCSQKAVIYSLNFTANPPQRVFELVDQINPSIFCIHITN

SEQ ID NO: 1417 - protein, 587 aa, Homo sapiens; identical to SEQ ID NO: 346

SEQ ID NO: 1418 - protein, 137 aa, Homo sapiens
  SITE (52): Xaa equals any of the naturally occurring L-amino acids
  SITE (117): Xaa equals any of the naturally occurring L-amino acids
  SITE (133): Xaa equals any of the naturally occurring L-amino acids
  SITE (137): Xaa equals any of the naturally occurring L-amino acids
MVEEPGRFLPLWLHILLITVLLVLSGIFSGLNLGLMALDPMELRIVQNCGTXKERRYARKIEPIRRKGNYLLCSLLLGNVLVNTSLTILLDNLIGSGLMAVASFTIGICHLWGDPTXGPCAPRHGAWLVGCQXPCFX

SEQ ID NO: 1419 - protein, 157 aa, Homo sapiens
  SITE (90): Xaa equals any of the naturally occurring L-amino acids
LKPFSQTPYFESPSFSPSWGWRQEDMWEATEAGSLCPLLCGWQGSPGLIHPLMEPQERRAPPKGMQLAAPLSHTCDPSVRGHPALAEVSXTVLRALPSCEFLPWRLFPGAESGPAAKLQASQGWGGCGTKVHVGPSTGCSRSWVPRAWQVKLCRPSA

SEQ ID NO: 1420 - protein, 631 aa, Homo sapiens [sequence omitted]

SEQ ID NO: 1421 - protein, 83 aa, Homo sapiens
MGVRVWELPAQPTGLHLLCFCTRTMLLALKLPKTKHSFPDPYTSILSFIHPAFTENLTLCQVSVFLSSSNTEMNQMFHGVSFR

SEQ ID NO: 1422 - protein, 103 aa, Homo sapiens
  SITE (86): Xaa equals any of the naturally occurring L-amino acids
  SITE (87): Xaa equals any of the naturally occurring L-amino acids
  SITE (93): Xaa equals any of the naturally occurring L-amino acids
  SITE (94): Xaa equals any of the naturally occurring L-amino acids
  SITE (96): Xaa equals any of the naturally occurring L-amino acids
MMASIQSFSAMALLFYTVFMFVIVLSSLKHGLFSGQWLRRVSYVRWEGVFRCIPIFGMSFACQSQVLPTYDSLDEPSVKTMSSIFXXSLNVVXXFXVMVGVFR

SEQ ID NO: 1423 - protein, 384 aa, Homo sapiens
  SITE (96): Xaa equals any of the naturally occurring L-amino acids
  SITE (131): Xaa equals any of the naturally occurring L-amino acids
QRQEDEEDKPRQVEVHQEPGAAVPRGQEAPEGKARETVENLPPLPLDPVLRAPGGRPAPSQDLNQRSLEHSEGPVGRDPAGPPDGGPDTEPRAAQXKLRDGQKDAAPRAAGTVKELPKGPEQVPVPDPARXAGGPEERLAEEFPGQSQDVTGGSQDRKKPGKEVAATGTSILKEANWLVAGPGAETGDPRMKPKQVSRDLGLAADLPGGAEGAAAQPQAVLRQPELRVISDGEQGGQQGHRLDHGGHLEMRKARGGDHVPVSHEQPRGGEDAAVQEPRQRPEPELGLKRAVPGGQRPDNAKPNRDLKLQAGSDLRRRRRDLGPHAEGQLAPRDGVIIGLNPLPDVQVNDLRGALDAQLRQAAGGALQVVHSRQLRQAPGPPEES

SEQ ID NO: 1424 - protein, 973 aa, Homo sapiens
MMASIQSFSAMALLFYTVFMFVIVLSSLKHGLFSGQWLRRVSYVRWEGVFRCIPIFGMSFACQSQVLPTYDSLDEPSVKTMSSIFASSLNVVTTFYVMVGFFGYVSFTEATAGNVLMHFPSNLVTEMLRVGFMMSVAVGFPMMILPCRQALSTLLCEQQQKDGTFAAGGYMPPLRFKALTLSVVFGTMVGGILIPNVETILGLTGATMGSLICFICPALIYKKIHKNALSSQVVLWVGLGVLVVSTVTTLSVSEEVPEDLAEEAPGGRLGEAEGLMKVEAARLSAQDPVVAVAEDGREKPKLPKEREELEQAQIKGPVDVPGREDGKEAPEEAQLDRPGQGIAVPVGEAHRHEPPVPHDKVVVDEGQDREVPEENKPPSRHAGGKAPGVQGQMAPPLPDSEREKQEPEQGEVGKRPGQAQALEEAGDLPEDPQKVPEADGQPAVQPAKEDLGPGDRGLHPRPQAVLSEQQNGLAVGGGEKAKGGPPPGNAAGDTGQPAEDSDHGGKPPLPAEKPAPGPGLPPEPREQRDVERAGGNQAASQLEEAGRAEMLDHAVLLQVIKEQQVQQKRLLDQQEKLLAVIEEQHKEIHQQRQEDEEDKPRQVEVHQEPGAAVPRGQEAPEGKARETVENLPPLPLDPVLRAPGGRPAPSQDLNQRSLEHSEGPVGRDPAGPPDGGPDTEPRAAQGKLRDGQKDAAPRAAGTVKELPKGPEQVPVPDPAREAGGPEERLAEEFPGQSQDVTGGSQDRKKPGKEVAATGTSILKEANWLVAGPGAETGDPRMKPKQVSRDLGLAADLPGGAEGAAAQPQAVLRQPELRVISDGEQGGQQGHRLDHGGHLEMRKARGGDHVPVSHEQPRGGEDAAVQEPRQRPEPELGLKRAVPGGQRPDNAKPNRDLKLQAGSDLRRRRRDLGPHAEGQLAPRDGVIGLNPLPDVQVNDLRGALDAQLRQAAGGALQVVHSRQLRQAPGPPEES

SEQ ID NO: 1425 - protein, 110 aa, Homo sapiens
  SITE (89): Xaa equals any of the naturally occurring L-amino acids
  SITE (96): Xaa equals any of the naturally occurring L-amino acids
  SITE (104): Xaa equals any of the naturally occurring L-amino acids
MYLQIPVKHMLHSGYQATFFSPKIGCSSILVFVCLLVFLRQSLALLPRLEYSGAILAHCNLHLLGSSDSPASASPVAGITGMHHHTQLXFCTFSRXGIYQLASXSPNPDL

SEQ ID NO: 1426 - protein, 57 aa, Homo sapiens
FNTPKIFFGTYHRQGTLISTGDTISCLGLLCSSAAREGIAICRILKKHKHKGAKLYI

SEQ ID NO: 1427 - protein, 127 aa, Homo sapiens
MLHSGYQATFFSPKIGCSSILVFVCLLVFLRQSLALLPRLEYSGAILAHCNLHLLGSSDSPASASPVAGITGMHHHTQLFFCTFSRDGILPCWPGWSPTPDLRQSTLLSLPKCWDYRHEPLRPAQAF

SEQ ID NO: 1428 - protein, 80 aa, Homo sapiens [sequence omitted]

SEQ ID NO: 1429 - protein, 73 aa, Homo sapiens
  SITE (38): Xaa equals any of the naturally occurring L-amino acids
HFSFWFIHFPHFHLKILTKCLAEFSKYNNFTLPADNEXIRVQNPFQLSKHLLSLYFVSDTGVKFWKCKRNLHL

SEQ ID NO: 1430 - protein, 80 aa, Homo sapiens [sequence omitted]

SEQ ID NO: 1431 - protein, 26 aa, Homo sapiens
MLRWHLWSWFCWFCLSEAGVLLDLPT

SEQ ID NO: 1432 - protein, 84 aa, Homo sapiens
  SITE (1): Xaa equals any of the naturally occurring L-amino acids
  SITE (25): Xaa equals any of the naturally occurring L-amino acids
  SITE (42): Xaa equals any of the naturally occurring L-amino acids
  SITE (64): Xaa equals any of the naturally occurring L-amino acids
  SITE (79): Xaa equals any of the naturally occurring L-amino acids
XMSRQHRLNPHGPDPAAPHRACRLXSPRQVTWLTPAEALPLXPCPSQCGAHCRQHGPEREGSAXPAALLRPGLPVFGHXLRLSQ

SEQ ID NO: 1433 - protein, 26 aa, Homo sapiens
MLRWHLWSWFCWFCLSEAGVLLDLPT

SEQ ID NO: 1434 - protein, 139 aa, Homo sapiens
MALRMLWAGQAKGILGGWGIICLVMSLLLQHPGVYSKCYFQAQAPCHYEGKYFTLGESWLRKDCFHCTCLHPVGVGCCDTSQHPIDFPAGCEVRQEAGTCQFSLVQKSDPRLPCKGGGPDPEWGSANTPVPGAPAPHSS

SEQ ID NO: 1435 - protein, 139 aa, Homo sapiens; identical to SEQ ID NO: 1434

SEQ ID NO: 1436 - protein, 80 aa, Homo sapiens
MFDRCRVTSCSCTCGAGAKWCTHVVALCLFRIHNASAVCLRAPVSESLSRLQRDQLQKFAQYLISELPQQVGEVGTPSCN

SEQ ID NO: 1437 - protein, 145 aa, Homo sapiens
DPSGSFMGRSVMMRILGSPVFFPMHDTSVCLTYPNFYTVVSPTGSRPPSRNWNSETPGDEELGFEAAVAALGMKTTVSEAEHPLLCEGTRREKGDLALALMITYKDDQAKLKKKISRAWWRAPVVPATREAEVGELLEPRSLRLQ

SEQ ID NO: 1438 - protein, 80 aa, Homo sapiens; identical to SEQ ID NO: 1436

SEQ ID NO: 1439 - protein, 91 aa, Homo sapiens
  SITE (56): Xaa equals any of the naturally occurring L-amino acids
MASQVPSSPFQSFFVFVFVFLRPSHSVAQAGVPLHFYFFIQQVLIKCALYQVLSSXLGYNGDQGDCRFWQGKLTSNTATRHSETLSLLEEL

SEQ ID NO: 1440 - protein, 137 aa, Homo sapiens
  SITE (132): Xaa equals any of the naturally occurring L-amino acids
MSAKQVTSQSSLSENDGFQAFVWWLLGIGALTFALLMSARMGIFQETLYKRFGKHSKEALFYNHALPLPGFVFLASDIYDHAVLFNKSELYEIPVIGVTLPIMWFYLLMNIITQYVCIRGVFILTTGMRLPXRHARS

SEQ ID NO: 1441 - protein, 94 aa, Homo sapiens
  SITE (6): Xaa equals any of the naturally occurring L-amino acids
PYPFCXPSPFPSSAAPHSQSDAAGTTITRSGQVNRDTSNSRAGLPPAFWEGKRCSPELIPSDSAARLVGLLFPTFCFFFFLCKSQMLLSIAFCD

SEQ ID NO: 1442 - protein, 104 aa, Homo sapiens
  SITE (104): Xaa equals any of the naturally occurring L-amino acids
MGFSGPALLFPIFLLHSASSMLSHTSTIVQTNKQTEERKDGEFCNRAAKSQSKQEEVEGTKTNKQRCLDYSTVDMPSILACAPLSITGHNSEEVQIKWCLFVCX

SEQ ID NO: 1443 - protein, 104 aa, Homo sapiens; identical to SEQ ID NO: 1442
  SITE (104): Xaa equals any of the naturally occurring L-amino acids

SEQ ID NO: 1444 - protein, 88 aa, Homo sapiens [sequence omitted]

SEQ ID NO: 1445 - protein, 64 aa, Homo sapiens [sequence omitted]

SEQ ID NO: 1446 - protein, 88 aa, Homo sapiens [sequence omitted]

SEQ ID NO: 1447 - protein, 82 aa, Homo sapiens
  SITE (61): Xaa equals any of the naturally occurring L-amino acids
MASHSFLLDIYLVLSLWKCIPGLVQDVFLEMKVLTESALCKVMTLEPLQHSVLVFRCWQSXFQAKSSRPCQASIFAYYTLNF

SEQ ID NO: 1448 - protein, 82 aa, Homo sapiens
MASHSFLLDIYLVLSLWKCIPGLVQDVFLEMKVLTESALCKVMTLEPLQHSVLVFRCWQSPFQAKSSRPCQASIFAYYTLNF

SEQ ID NO: 1449 - protein, 103 aa, Homo sapiens
MQSFHHPLRILLWLPLVTKKSLCPVHKTMTQLSLVLASLSNSLSFGYPGFVRANRQTSLIGEFLGGGGWHAFAYCFLSAENASLSLAVSATPPDLVSLICLSQ

SEQ ID NO: 1450 - protein, 50 aa, Homo sapiens
  SITE (33): Xaa equals any of the naturally occurring L-amino acids
AAMRWRWWQRLLPWRLLQARGFPQNSAPSLGLXARTYSQGDCSYSRTALL

SEQ ID NO: 1451 - protein, 130 aa, Homo sapiens
  SITE (31): Xaa equals any of the naturally occurring L-amino acids
  SITE (115): Xaa equals any of the naturally occurring L-amino acids
  SITE (116): Xaa equals any of the naturally occurring L-amino acids
  SITE (122): Xaa equals any of the naturally occurring L-amino acids
  SITE (126): Xaa equals any of the naturally occurring L-amino acids
  SITE (127): Xaa equals any of the naturally occurring L-amino acids
MRWRWWQRLLPWRLLQARGFPQNSAPSLGLXARTYSQGDCSYSRTALYDLLGVPSTATQAQIKAAYYRQCFLYHPDRNSGSAEAAERFTRISQAYVVLGSAPSVASMIAAYSATXXCADLAXGLQXXRHP

SEQ ID NO: 1452 - protein, 30 aa, Homo sapiens
LNPWPLIVYLCWDPKELYSPCPPRPAQLSR

SEQ ID NO: 1453 - protein, 226 aa, Homo sapiens
MAAMRWRWWQRLLPWRLLQARGFPQNSAPSLGLGARTYSQGDCSYSRTALYDLLGVPSTATQAQIKAAYYRQCFLYHPDRNSGSAEAAERFTRISQAYVVLGSATLRRKYDRGLLSDEDLRGPGVRPSRTPAPDPGSPRTPPPTSRTHDGSRASPGANRTMFNFDAFYQAHYGEQLERERRLRARREALRKRQEYRSMKGLRWEDTRDTAAIFLIFSIFIIIGFYI

SEQ ID NO: 1454 - protein, 302 aa, Homo sapiens
MLVTNRPGVLKEPKLMGAISFFIFFFTLLVLARQNEYYCRLDFLWKKKLRQEREETETMENLTRLLLENVLPAHVAPQFIGQNRRNEDLYHQSYECVCVLFASVPDFKEFYSESNINHEGLECLRLLNEIIADFDELLSKPKFSGVEKIKTIGSTYMAATGLNATSGQDAQQDAERSCSHLGTMVEFAVALGSKLDVINKHSFNNFRLRVGLNHGPVVAGVIGAQKPQYDIWGNTVNVASRMESTGVLGKIQVTEETAWALQSLGYTCYSRGVIKVKGKGQLCTYFLNTDLTRTGPPSATLG

SEQ ID NO: 1455 - protein, 76 aa, Homo sapiens
  SITE (11): Xaa equals any of the naturally occurring L-amino acids
MGPFFPYSLLXFFPCSFSSPSFIFLLLILKTGCSLFPCCPISPLCPYFSQSLSPLKSRAGRCYWCFFTLGPSSYLL

SEQ ID NO: 1456 - protein, 61 aa, Homo sapiens
TLTQHQGAHLGPFLDMSFLHYHSHEPPTSGIADQGWGENVACCFLVLVIIYLNKQCCKYLP

SEQ ID NO: 1457 - protein, 110 aa, Homo sapiens
  SITE (8): Xaa equals any of the naturally occurring L-amino acids
MRLSCPRXPGWMGPFFPYSLLSFFPCSFSSPSFIFLLLILKTGCSLFPCCPISPLCPYFSQSLSPLKSRAGRCYWCFFTLGPSSIFVFSVYPLPDTSFSPSLGPKAENQC

SEQ ID NO: 1458 - protein, 99 aa, Homo sapiens
MGPFFPYSLLSFFPCSFSSPSFIFLLLILKTGCSLFPCCPISPLCPYFSQSLSPLKSRAGRCYWCFFTLGPSSIFVFSVYPLPDTSFSPSLGPKAENQC

SEQ ID NO: 1459 - protein, 98 aa, Homo sapiens
MFICFLTLLTPGFSLSLRRKHYLITFRWFTYSVKNMCKYFVQSPVSNKQPYVVTNHLFCHSVLGHRSVGMVSDLDAPTFHVRPRTVPWSVDSWSALTG

SEQ ID NO: 1460 - protein, 98 aa, Homo sapiens; identical to SEQ ID NO: 1459

SEQ ID NO: 1461 - protein, 33 aa, Homo sapiens
MLVLVSGIIFSLADRSSSSTIRMDALAFLQGLL

SEQ ID NO: 1462 - protein, 89 aa, Homo sapiens
MLVLVSGIIFSLADRSSSSTIRMDALAFLQGLLGTEPAEAFHPHLPILLPPVMACVADPFYKIAARGPGGAAGAGAGPVAAAQASDAGS

SEQ ID NO: 1463 - protein, 125 aa, Homo sapiens
MYFIFTSFWAYKIYYVYGFMMLVLVILCIVTVCVTIVCTYFLLNAEDYRWQWTSFLSAASTAIYVYMYSFYYYFFKTKMYGLFQTSFYFGYMAVFSTALGIMCGAIGYMGTSAFVRKIYTNVKID

SEQ ID NO: 1464 - protein, 125 aa, Homo sapiens; identical to SEQ ID NO: 1463

SEQ ID NO: 1465 - protein, 250 aa, Homo sapiens
MRGTPKTHLLAFSLLCLLSKVRTQLCPTPCTCPWPPPRCPLGVPLVLDGCGCCRVCARRLGEPCDQLHVCDASQGLVCQPGAGPGGRGALCLLAEDDSSCEVNGRLYREGETFQPHCSIRCRCEDGGFTCVPLCSEDVRLPSWDCPHPRRVEVLGKCCPEWVCGQGGGLGTQPLPAQGPQFSGLVSSLPPGVPCPEWSTAWGPCSTTCGLGMATRVSNQNRFCRLETQRRLCLSRPCPPSRGRSPQNSAF

SEQ ID NO: 1466 - protein, 250 aa, Homo sapiens; identical to SEQ ID NO: 1465

SEQ ID NO: 1467 - protein, 388 aa, Homo sapiens
  SITE (277): Xaa equals any of the naturally occurring L-amino acids
MMTITFLPYTFSLMVTFPDVPLGIFLFCVCVIAIGVVQALIVGYAFHFPHLLSPQIQRSAHRALYRRHVLGIVLQGPALCFAAAIFSLFFVPLSYLLMVTVILLPYVSKVTGWCRDRLLGHREPSAHPVEVFSFDLHEPLSKERVEAFSDGVYAIVATLLILDICEDNVPDPKDVKERFSGSLVAALSATGPRFLAYFGSFATVGLLWFAHHSLFLHVRKATRAMGLLNTLSLAFVGGLPLAYQQTSAFARQPRDELERVRVSCTIIFLASIFQLAXWTTALLHQAETLQPSVWFGGREHVLMFAKLALYPCASLLAFASTCLLSRFSVGIFHLMQIAVPCAFLLLRLLVGLALATLRVLRGLARPEHPPPAPTGQDDPQSQLLPAPC

SEQ ID NO: 1468 - protein, 388 aa, Homo sapiens
MMTITFLPYTFSLMVTFPDVPLGIFLFCVCVIAIGVVQALIVGYAFHFPHLLSPQIQRSAHRALYRRHVLGIVLQGPALCFAAAIFSLFFVPLSYLLMVTVILLPYVSKVTGWCRDRLLGHREPSAHPVEVFSFDLHEPLSKERVEAFSDGVYAIVATLLILDICEDNVPDPKDVKERFSGSLVAALSATGPRFLAYFGSFATVGLLWFAHHSLFLHVRKATRAMGLLNTLSLAFVGGLPLAYQQTSAFARQPRDELERVRVSCTIIFLASIFQLAMWTTALLHQAETLQPSVWFGGREHVLMFAKLALYPCASLLAFASTCLLSRFSVGIFHLMQIAVPCAFLLLRLLVGLALATLRVLRGLARPEHPPPAPTGQDDPQSQLLPAPC

SEQ ID NO: 1469 - protein, 262 aa, Homo sapiens
  SITE (231): Xaa equals any of the naturally occurring L-amino acids
MSPPPLLQPLLLLLPLLNVEPSGATLIRIPLHRVQPGRRILNLLRGWREPAELPKLGAPSPGDKPIFVPLSNYRDVQYFGEIGLGTPPQNFTVAFDTGSSNLWVPSRRCHFFSVPCWLHHRFDPKASSSFQANGTKFAIQYGTGRVDGILSEDKLTIGGIKGASVIFGEALWEPSLVFAFAHFDGILGLGFPILSVEGVRPPMDVLVEQGLLDKPVFSFYLNRDPEEPDGXELVLGGSDPAHYIPPSPFVPVRSPPMADPQG

SEQ ID NO: 1470 - protein, 145 aa, Homo sapiens
MSPPPLLQPLLLLLPLLNVEPSGATLIRIPLHRVQPGRRILNLLRGWREPAELPKLGAPSPGDKPIFVPLSNYRDVQYFGEIGLGTPPQNFTVAFDTGSSNLWVPSRRCHFFSVPCWLHHRFDPKASSSFRPMGPSLPFNMELGG

SEQ ID NO: 1471 - protein, 212 aa, Homo sapiens
  SITE (9): Xaa equals any of the naturally occurring L-amino acids
GSAGTARIXGSTTRPDPEEPDGGELVLGGSDPAHYIPPLTFVPVTVPAYWQIHMERVKVGPGLTLCAKGCAAILDTGTSLITGPTEEIRALHAAIGGIPLLAGEYIILCSEIPKLPAVSFLLGGVWFNLTAHDYVIQTTRNGVRLCLSGFQALDVPPPAGPFWILGDVFLGTYVAVFDRGDMKSSARVGLARARTRGADLGWGETAQAQFPG

SEQ ID NO: 1472 - protein, 150 aa, Homo sapiens [sequence omitted]

SEQ ID NO: 1473 - protein, 150 aa, Homo sapiens [sequence omitted]

SEQ ID NO: 1474 - protein, 353 aa, Homo sapiens [sequence omitted]

SEQ ID NO: 1475 - protein, 353 aa, Homo sapiens [sequence omitted]

SEQ ID NO: 1476 - protein, 80 aa, Homo sapiens
  SITE (11): Xaa equals any of the naturally occurring L-amino acids
MTHCLLHGMGXAGAASLTPKPMSLISAYCGGLWLAAVAVMVQMAALCGAQDIQDKFSSILSRGQEAYERLLWNGEFGEPK

SEQ ID NO: 1477 - protein, 415 aa, Homo sapiens
VGLVSMLGIPIPGAEGAPVLNSLVFLSGQSTPTQKGVGIAGAVCVSSKLRPRGQCRLEFSLAWDMPRIMFGAKGQVHYRRYTRFFGQDGDAAPALSHYALCRYAEWEERISAWQSPVLDDRSLPAWYKSALFNELYFLADGGTVWLEVLEDSLPEELGRNMCHLRPTLRDYGRFGYLEGQEYRMYNTYDVHFYASFALIMLWPKLELSLQYDMALATLREDLTRRRYLMSGVMAPVKRRNVIPHDIGDPDDEPWLRVNAYLIHDTADWKDLNLKFVLQVYRDYYLTGDQNFLKDMWPVCLAVMESEMKFDKDHDGLIENGGYADQTYDGWVTTGPSAYCGGLWLAAVAVMVQMAALCGAQDIQDKFSSILSRGQEAYERLLWNGRYYNYDSSSRPQSRSVMSDQCAGQWFLKACG

SEQ ID NO: 1478 - protein, 86 aa, Homo sapiens
  SITE (75): Xaa equals any of the naturally occurring L-amino acids
MSLGGSQSSLVSWRATQIACMTLSWPLWTCWLAAPLSLTKSPWRQWSTHVKGFNLASSQAEVQPVGQTLASEKKXLQEVLARAIQH

SEQ ID NO: 1479 - protein, 159 aa, Homo sapiens
  SITE (153): Xaa equals any of the naturally occurring L-amino acids
  SITE (158): Xaa equals any of the naturally occurring L-amino acids
MHRLIFVYTLICANFCSCRDTSATPQSASIKALRNANLRRDESNHLTDLYRRDETIQVKGNGYVQSPRFPNSYPRNLLLTWRLHSQENTRIQLVVDNQFGLEEAENDICRYDFVEVEDISETSTIIRGRWCGHKEVPPRIKSRTNHIKITFKXDDYFXA

SEQ ID NO: 1480 - protein, 89 aa, Homo sapiens
  SITE (33): Xaa equals any of the naturally occurring L-amino acids
  SITE (63): Xaa equals any of the naturally occurring L-amino acids
LIIKKGKIWFPEKRPIPKHFFHEKHCILTYVDXNNLSPKPCHNNISALEIKSLCFLCILLRHXYSFNTYLKNLLRRFFIIVLQKTMYKL

SEQ ID NO: 1481 - protein, 370 aa, Homo sapiens
  SITE (216): Xaa equals any of the naturally occurring L-amino acids
MHRLIFVYTLICANFCSCRDTSATPQSASIKALRNANLRRDESNHLTDLYRRDETIQVKGNGYVQSPRFPNSYPRNLLLTWRLHSQENTRIQLVFDNQFGLEEAENDICRYDFVEVEDISETSTIIRGRWCGHKEVPPRIKSRTNQIKITFKSDDYFVAKPGFKIYYSLLEDFQPAAASETNWESVTSSISGVSYNSPSVTDPTLIADALDKKIAXFDTVEDLLKYFNPESWQEDLENMYLDTPRYRGRSYHDRKSKVDLDRLNDDAKRYSCTPRNYSVNIREELKLANVVFFPRCLLVQRCGGNCGCGTVNWRSCTCNSGKTVKKYHEVLQFEPGHIKRRGRAKTMALVDIQLDHHERCDCICSSRPPR

SEQ ID NO: 1482 - protein, 370 aa, Homo sapiens
MHRLIFVYTLICANFCSCRDTSATPQSASIKALRNANLRRDESNHLTDLYRRDETIQVKGNGYVQSPRFPNSYPRNLLLTWRLHSQENTRIQLVFDNQFGLEEAENDICRYDFVEVEDISETSTIIRGRWCGHKEVPPRIKSRTNQIKITFKSDDYFVAKPGFKIYYSLLEDFQPAAASETNWESVTSSISGVSYNSPSVTDPTLIADALDKKIAEFDTVEDLLKYFNPESWQEDLENMYLDTPRYRGRSYHDRKSKVDLDRLNDDAKRYSCTPRNYSVNIREELKLANVVFFPRCLLVQRCGGNCGCGTVNWRSCTCNSGKTVKKYHEVLQFEPGHIKRRGRAKTMALVDIQLDHHERCDCICSSRPPR

SEQ ID NO: 1483 - protein, 229 aa, Homo sapiens
  SITE (206): Xaa equals any of the naturally occurring L-amino acids
MYKLLLFDLLTVLAVALLIQFPRKLLCGLCPGALGRLAGTQEFQVPDEVLGLIYAQTVVWVGSFFCPLLPLLNTVKFLLLFYLKKLTLFSTCSPAARTFRASAANFFFPLVLLLGLAISSVPLLYSIFLIPPSKLCGPFRGQSSIWAQIPESISSLPETTQNFLFFLGTQAFAVPLLLISSILMAYTVALANSYGRLISELKRQRXTEAQNKVFLARRAVALTSTKPAL

SEQ ID NO: 1484 - protein, 85 aa, Homo sapiens
  SITE (33): Xaa equals any of the naturally occurring L-amino acids
  SITE (62): Xaa equals any of the naturally occurring L-amino acids
FLGTQAFAVPLLLISRSQTFGYNGRACQEWLPXLISSILMAYTVALANSYGRLISELKRQRXTEAQNKVFLARRAVALTSTKPAL

SEQ ID NO: 1485 - protein, 229 aa, Homo sapiens; identical to SEQ ID NO: 1483
  SITE (206): Xaa equals any of the naturally occurring L-amino acids

SEQ ID NO: 1486 - protein, 93 aa, Homo sapiens
MATFSLCYLMAFPLCAGIAGISVCVKISCFYKDISQTGLRPTLKAYLNFNLLFSGPISKYSLILRYWYLGLQHTNFGVDTIQPITNCAHEMIY

SEQ ID NO: 1487 - protein, 124 aa, Homo sapiens
  SITE (19): Xaa equals any of the naturally occurring L-amino acids
  SITE (25): Xaa equals any of the naturally occurring L-amino acids
  SITE (28): Xaa equals any of the naturally occurring L-amino acids
  SITE (56): Xaa equals any of the naturally occurring L-amino acids
  SITE (70): Xaa equals any of the naturally occurring L-amino acids
ALPFTLNKTSNYPQDLVLXSLLLGXNYXQLQILLECIFPVPHSLLYVVLPNSIDLXQKLPRDLPHLPCPXFLWPRPGSPPKCFLSLSLTALPLSSCRYTLPPSPHPLMPSPLLPSWVQPSCYLA

SEQ ID NO: 1488 - protein, 59 aa, Homo sapiens
MATFSLCYLMAFPLCAGIAGISVCVKISCFYKDISQTGLRPTLKAYLNFNLLFSGPIQI

SEQ ID NO: 1489 - protein, 314 aa, Homo sapiens
GSGRQAGWPRGLLSGPAPSERSAVARLAPTESLARMEAVVNLYQEVMKHADPRIQGYPLMGSPLLMTSILLTYVYFVLSLGPRIMANRKPFQLRGFMIVYNFSLVALSLYIVYEFLMSGWLSTYTWRCDPVDYSNSPEALRMVRVAWLFLFSKFIELMDTVIFILRKKDGQVTFLHVFHHSVLPWSWWWGVKIAPGGMGSFHAMINSSVHVIMYLYYGLSAFGPVAQPYLWWKKHMTAIQLIQFVLVSLHISQYYFMSSCNYQYPVIIHLIWMYGTIFFMLFSNFWYHSYTKGKRLPRALQQNGAPGIAKVKAN

SEQ ID NO: 1490 - protein, 258 aa, Homo sapiens [sequence omitted]

SEQ ID NO: 1491 - protein, 222 aa, Homo sapiens
MKHADPRIQGYPLMGSPLLMTSILLTYVYFVLSLGPRIMANRKPFQLRGFMIVYNFSLVALSLYIVYEVIFILRKKDGQVTFLHVFHHSVLPWSWWWGVKIAPGGMGSFHAMINSSVHVIMYLYYGLSAFGPVAQPYLWWKKHMTAIQLIQFVLVSLHISQYYFMSSCNYQYPVIIHLIWMYGTIFFMLFSNFWYHSYTKGKRLPRALQQNGAPGIAKVKAN

SEQ ID NO: 1492 - protein, 93 aa, Homo sapiens [sequence omitted]

SEQ ID NO: 1493 - protein, 65 aa, Homo sapiens
KLSNCNCFQLLSEVGIMVDLISSVLFLQLYYQVLNFGMIVSSALMIWKGLMVITGSESPIVVVLR

SEQ ID NO: 1494 - protein, 93 aa, Homo sapiens [sequence omitted]

SEQ ID NO: 1495 - protein, 81 aa, Homo sapiens
MGKPSLLFFGLMASWRTRSQARRTWSTSSRMPGRNVLLRSRKRRSQISSSISWSIALGPVMPWPGLILFLKISRSSTPTRL

SEQ ID NO: 1496 - protein, 81 aa, Homo sapiens; identical to SEQ ID NO: 1495

SEQ ID NO: 1497 - protein, 47 aa, Homo sapiens
  SITE (47): Xaa equals any of the naturally occurring L-amino acids
MRLRFWLLIWLLLGFISHQPTPVINSLAVYRHRETDFGVRVRDHPWX

SEQ ID NO: 1498 - protein, 394 aa, Homo sapiens
  SITE (73): Xaa equals any of the naturally occurring L-amino acids
  SITE (194): Xaa equals any of the naturally occurring L-amino acids
  SITE (200): Xaa equals any of the naturally occurring L-amino acids
  SITE (210): Xaa equals any of the naturally occurring L-amino acids
  SITE (225): Xaa equals any of the naturally occurring L-amino acids
  SITE (237): Xaa equals any of the naturally occurring L-amino acids
  SITE (389): Xaa equals any of the naturally occurring L-amino acids
EVINTLADHRHRGTDFGGSPWLLIITVFLRSYKFAISLCTSYLCVSFLKTIFPSQNGHDGSTDVQQRARRSNXRRQEGIKIVLEDIFTLWRQVETKVRAKIRKMKVTTKVNRHDKINGKRKTAKEHLRKLSMKEREHGEKERQVSEAEENGKLDMKEIHTYMEMFQRAQALRRRAEDYYRCKITPSARKPLCNXVRMAAXEHRHSSGLPXWPYLTAETLKNRMGXQPPPPTQQHSIXDNSLSLKTPPECLLHPLPPSVDDNIKECPLAPLPPSVDDNLKECLLVPLPPSPLPPSVDDNLKDCLFVPLPPSPLPPSVDDNLKTPPLATQEAEAEKPPKPKRWRVDEVEQSPKPKRRRADEVEQSPKPKRQREAEAQQLPKPKRRRLSKLXTRHCT

SEQ ID NO: 1499 - protein, 212 aa, Homo sapiens
  SITE (54): Xaa equals any of the naturally occurring L-amino acids
  SITE (74): Xaa equals any of the naturally occurring L-amino acids
  SITE (81): Xaa equals any of the naturally occurring L-amino acids
  SITE (101): Xaa equals any of the naturally occurring L-amino acids
  SITE (122): Xaa equals any of the naturally occurring L-amino acids
MRLRFWLLIWLLLGFISHQPTPVINSLAVYRHRETDFGVGVRDHPGQHGKTPSXQKLDNLIIIIIGFLRRYTFXILFCTSXLCVSFLKTIFWSRNGHDGSXDVQQRAWRSNRSRQKGLRSIXMHTKKRVSSFRGNKIGLKDVITLRRHVETKVRAKIRKRKVTTKINRHNKINGKRKTARKQKMFQRAQELRRRAEDYHKCKVRSFLPAVAG

SEQ ID NO: 1500 - protein, 121 aa, Homo sapiens
  SITE (110): Xaa equals any of the naturally occurring L-amino acids
  SITE (112): Xaa equals any of the naturally occurring L-amino acids
  SITE (114): Xaa equals any of the naturally occurring L-amino acids
  SITE (116): Xaa equals any of the naturally occurring L-amino acids
MATLVWRLYLLQPELVLPSPPPPPRFPGPVQTPKIPGPARGPRTGFQPPAFSFPSPTPFFSAGTPVLSWKFAVLCPIAQELLPAEKGARNKCSGLSRSYIFAMLPEMGGXNXLXQXNEWHG

SEQ ID NO: 1501 - protein, 128 aa, Homo sapiens
MDRLKSHLTVCFLPSVPFLILVSTLATAKSVTNSTLNGTNVVLGSVPVIIARTDHIIVKEGNSALINCSVYGIPDPQFKWYNSIGKLLKEEEDEKERGGGKWQMHDSGLLNITKVSFSDRGKYTVCGF

SEQ ID NO: 1502 - protein, 120 aa, Homo sapiens
  SITE (5): Xaa equals any of the naturally occurring L-amino acids
  SITE (7): Xaa equals any of the naturally occurring L-amino acids
  SITE (8): Xaa equals any of the naturally occurring L-amino acids
  SITE (14): Xaa equals any of the naturally occurring L-amino acids
  SITE (40): Xaa equals any of the naturally occurring L-amino acids
LEFKXPXXQVPPWXWLSLFKKYRSATIANARTWVFCSFFXVLILLFLYNGVIVINTNCSFWFSPHCHFCPYVSLEHVPQRLWYQSPVPGLISTSHITFVMFQSSYEACYFFFIPQAYFHR

SEQ ID NO: 1503 - protein, 409 aa, Homo sapiens
MDRLKSHLTVCFLPSVPFLILVSTLATAKSVTNSTLNGTNVVLGSVPVIIARTDHIIVKEGNSALINCSVYGIPDPQFKWYNSIGKLLKEEEDEKERGGGKWQMHDSGLLNITKVSFSDRGKYTCVASNIYGTVNNTVTLRVIFTSGDMGVYYMVVCLVAFTIVMVLNITRLCMMSSHLKKTEKAINEFFRTEGAEKLQKAFEIAKRIPIITSAKTLELAKVTQFKTMEFARYIEELARSVPLPPLIMNCRTIMEEIMEVVGLEEQGQNFVRHTPEGQEAADRDEVYTIPNSLKRSDSPAADSDASSLHEQPQQIAIKVSVHPQSKKEHADDQEGGQFEVKDVEETELSAEHSPETAEPSTDVTSTELTSEEPTPVEVPDKVLPPAYLEATEPAVTHDKNTCIIYESHV

SEQ ID NO: 1504 - protein, 107 aa, Homo sapiens
  SITE (63): Xaa equals any of the naturally occurring L-amino acids
  SITE (64): Xaa equals any of the naturally occurring L-amino acids
  SITE (82): Xaa equals any of the naturally occurring L-amino acids
SMKAKRNKGRWVAAGPTAATAWIVLTVQAACPEGKCPLPGVCAPITWAPSYLTAGKAKLAGPXXYKPGPVLKAAHLPMGQHXHTTPWWQPLFIISVSRYPPRTPKQH

SEQ ID NO: 1505 - protein, 106 aa, Homo sapiens
MKAKRNKGRWVAAGPTAATAWIVLTVQAACPEGKCPLPGVCAPITWAPSYLTAGKAKLAGPRTYKPGPVLKAAHLPMGQHPHTTPWWQPLFIISVSRYPPRTPKQH

SEQ ID NO: 1506 - protein, 106 aa, Homo sapiens; identical to SEQ ID NO: 1505

SEQ ID NO: 1507 - protein, 109 aa, Homo sapiens
MVSCWDQNLILFLTCLLAVLIFCLVLAVYIVFFKFLKASLIYVPREWVTLTKANDVQKGHDLGLSYCRTQSTAWPPPCLGHHLHLESSLTLESFGLLTIPISDSVSLIT

SEQ ID NO: 1508 - protein, 71 aa, Homo sapiens
  SITE (32): Xaa equals any of the naturally occurring L-amino acids
GVRIDASGSLAAVLPLNHYTITEFNFLQFQGXTELSSDSKIRISNREWIHLRIGETDIHDLKQKSETKLIN

SEQ ID NO: 1509 - protein, 109 aa, Homo sapiens; identical to SEQ ID NO: 1507

SEQ ID NO: 1510 - protein, 82 aa, Homo sapiens
MGLQSRLSQPCHCRHLGLGNSVVGTVLFLVGCLVASLPPPTRCQGHCSPQPPAPVVTIVSKHCQMVQGKGKIAPVEKSTAVK

SEQ ID NO: 1511 - protein, 82 aa, Homo sapiens; identical to SEQ ID NO: 1510

SEQ ID NO: 1512 - protein, 115 aa, Homo sapiens [sequence omitted]

SEQ ID NO: 1513 - protein, 115 aa, Homo sapiens [sequence omitted]

SEQ ID NO: 1514 - protein, 56 aa, Homo sapiens; identical to SEQ ID NO: 987

SEQ ID NO: 1515 - protein, 56 aa, Homo sapiens; identical to SEQ ID NO: 987

SEQ ID NO: 1516 - protein, 147 aa, Homo sapiens [sequence omitted]

SEQ ID NO: 1517 - protein, 147 aa, Homo sapiens [sequence omitted]

SEQ ID NO: 1518 - protein, 92 aa, Homo sapiens
  SITE (70): Xaa equals any of the naturally occurring L-amino acids
MWQYHRLSCTAWQPVILSFSLSVGHRILLALFFFILHLSILIATECRPWYSFHLVSLPSFLPQFLLCLAXICLFGFTTLLFSFCCQVHVLGH

SEQ ID NO: 1519 - protein, 58 aa, Homo sapiens
  SITE (38): Xaa equals any of the naturally occurring L-amino acids
  SITE (58): Xaa equals any of the naturally occurring L-amino acids
DYILMRQLRPANFCIFSRDRFHPVSQAGLELLTSSDLXAFGLPKYWYYRHEPPCLASX

SEQ ID NO: 1520 - protein, 80 aa, Homo sapiens
  SITE (25): Xaa equals any of the naturally occurring L-amino acids
  SITE (80): Xaa equals any of the naturally occurring L-amino acids
MASWPFLSPMGPIALALLTQALSSXVGLCLALTCSRRPSPDSVCASCRFPLVPLCCQPSLPALLRPVSHCRYPGTSWVSX

SEQ ID NO: 1521 - protein, 56 aa, Homo sapiens
  SITE (46): Xaa equals any of the naturally occurring L-amino acids
VDLVSVNVGSEFLVTLLFFLGPVTGHLDRLNAILELDSYVFICTPXSHLPVASSDA

SEQ ID NO: 1522 - protein, 151 aa, Homo sapiens
  SITE (54): Xaa equals any of the naturally occurring L-amino acids
  SITE (92): Xaa equals any of the naturally occurring L-amino acids
  SITE (95): Xaa equals any of the naturally occurring L-amino acids
  SITE (117): Xaa equals any of the naturally occurring L-amino acids
  SITE (122): Xaa equals any of the naturally occurring L-amino acids
  SITE (128): Xaa equals any of the naturally occurring L-amino acids
  SITE (132): Xaa equals any of the naturally occurring L-amino acids
  SITE (139): Xaa equals any of the naturally occurring L-amino acids
MPLFFTRFHPALGPLALSLLAGFAAGSLQAIGRTEEKGVRVLTSQAPPYRVMGXLHSSTKGFSFCQGVCPRALSLWVTTPLFLPPSPRLAMXPTXSCPGYCHHVSLYPVYALQLVLXQILLXWPNLMXYWYXHLMTGPXSDQKRKSVVTLV

SEQ ID NO: 1523 - protein, 79 aa, Homo sapiens
  SITE (57): Xaa equals any of the naturally occurring L-amino acids
RVDNFLCQFIRIYLILLSSHIIFHNTNVSCYPMESHLLFSYNNTAVSILVHRFFNIXISKFLKVISWDRNRNGIGISKS

SEQ ID NO: 1524 - protein, 121 aa, Homo sapiens
MPLFFTRFHPALGPLALSLLAGFAAGSLQAIGRTEEKGVRVLTSQAPPYRVMGQLHSSTKGFSFCQGVCPRALSLWVTTPLFLPPSPRLAMVPTVSCPGYCPSCFSVSCLCFTTGPSSNSA

SEQ ID NO: 1525 - protein, 91 aa, Homo sapiens
  SITE (19): Xaa equals any of the naturally occurring L-amino acids
MGPVSELSIFILLFVFCFXFSLMPDIRRTLHFWLHSLLYPHETDQCLQSSAIPFQVFYVQQKKRASLSSSSHIIKGIAPLLNQSVNHSGPI

SEQ ID NO: 1526 - protein, 66 aa, Homo sapiens
  SITE (4): Xaa equals any of the naturally occurring L-amino acids
  SITE (13): Xaa equals any of the naturally occurring L-amino acids
STLXVTFICSSRXLLRERGAVLKTNPIPILLKKPLLCPSFIHNLVPHPHLPQLLLFSNFLCRCPYH

SEQ ID NO: 1527 - protein, 91 aa, Homo sapiens
MGPVSELSIFILLFVFCFVFSLMPDIRRTLHFWLHSLLYPHETDQCLQSSAIPFQVFYVQQKKRASLSSSSHIIKGIAPLLNQSVNHSGPI

SEQ ID NO: 1528 - protein, 336 aa, Homo sapiens
MALARPVRLFSLVTRLLLAPRRGLTVRSPDEPLPVVRIPVALQRQLEQRQSRRRNLPRPVLVRPGPLLVSARRPELNQPARLTLGRWERAPLASQGWKSRRARRDHFSIERAQQEAPAVRKLSSKGSFADLGLEPRVLHALQEAAPEVVQPTTVQSSTIPSLLRGRHVVCAAETGSGKTLSYLLPLLQRLLGQPSLDSLPIPAPRGLVLVPSRELAQQVRAVAQPLGRSLGLLVRDLEGGHGMRRIRLQLSRQPSADVLVATPGALWKALKSRLISLEQLSFLVLDEADTLLDESFLELVDYILEKSHIAEGPADLEDPFNPKAQLVLVGATFPEV

SEQ ID NO: 1529 - protein, 336 aa, Homo sapiens
  SITE (224): Xaa equals any of the naturally occurring L-amino acids
MALARPVRLFSLVTRLLLAPRRGLTVRSPDEPLPVVRIPVALQRQLEQRQSRRRNLPRPVLVRPGPLLVSARRPELNQPARLTLGRWERAPLASQGWKSRRARRDHFSIERAQQEAPAVRKLSSKGSFADLGLEPRVLHALQEAAPEVVQPTTVQSSTIPSLLRGRHVVCAAETGSGKTLSYLLPLLQRLLGQPSLDSLPIPAPRGLVLVPSRELAQQVRAVAXPLGRSLGLLVRDLEGGHGMRRIRLQLSRQPSADVLVATPGALWKALKSRLISLEQLSFLVLDEADTLLDESFLELVDYILEKSHIAEGPADLEDPFNPKAQLVLVGATFPEV

SEQ ID NO: 1530 - protein, 93 aa, Homo sapiens [sequence omitted]

SEQ ID NO: 1531 - protein, 219 aa, Homo sapiens
  SITE (41): Xaa equals any of the naturally occurring L-amino acids
AAATAASLSPRGCRLRTPSSDVSPSRAPPPSAAPLPTGRAXMSPSGRLCLLTIVGLILPTRGQTLKDTTSSSSADSTIMDIQVPTRAPDAVYTELQPTSPTPTWPADETPQPQTQTQQLEGTDGPLVTDPETHKSTKAAHPTDDTTTLSERPSPSTDVQTDPQTLKPSGFHEDDPFFYDEHTLRKRGLLVAAVLFITGIIILTSGKCRQLSRLCRNHCR

SEQ ID NO: 1532 - protein, 178 aa, Homo sapiens [sequence omitted]

SEQ ID NO: 1533 - protein, 152 aa, Homo sapiens
MELPAVNLKVILLGHWLLTTWGCIVFSGSYAWANFTILALGVWAVAQRDSIDAISMFLGGLLATIFLDIVHISIFYPRVSLTDTGRFGVGMAILSLLLKPLSCCFVYHMYRERGGFLGSSQDRSAYQTIDSAEAPADPFAVPEGRSQDARGY

SEQ ID NO: 1534 - protein, 159 aa, Homo sapiens
MELPAVNLKVILLGHWLLTTWGCIVFSGSYAWANFTILALGVWAVAQRDSIDAISMFLGGLLATIFLDIVHISIFYPRVSLTDTGRFGVGMAILSLLLKPLSCCFVYHMYRERGGELLVHTGFLGSSQDRSAYQTIDSAEAPADPFAVPEGRSQDARGY

SEQ ID NO: 1535 - protein, 91 aa, Homo sapiens
MPLAPLLLVLSPFSFDQVVQARLEVPVFKQRDLCNYVLILVGAQLKPLAMLVKNIRDYRLEPPCPACIDTFYPTFKTGMFSLCFKMPLKYF

SEQ ID NO: 1536 - protein, 64 aa, Homo sapiens
SATHQQALVCDVLLPVSMCSHENLYILCSGVSYFIFFFSCVTSVTSGLGIPSYPEVRKYSSIFF

SEQ ID NO: 1537 - protein, 91 aa, Homo sapiens; identical to SEQ ID NO: 1535

SEQ ID NO: 1538 - protein, 112 aa, Homo sapiens
  SITE (93): Xaa equals any of the naturally occurring L-amino acids
  SITE (98): Xaa equals any of the naturally occurring L-amino acids
  SITE (104): Xaa equals any of the naturally occurring L-amino acids
  SITE (106): Xaa equals any of the naturally occurring L-amino acids
MDLWTTSFFFFAVMHNAAMNINVQVSESGFSFWGRYLGVELLGCVVNLYLFKKWPNCFLNGCIILHPHQQYIRVSCFSTSYLLMAFKNYRHSXKCEVXPHCSLXCXFLITMM

SEQ ID NO: 1539 - protein, 113 aa, Homo sapiens [sequence omitted]

SEQ ID NO: 1540 - protein, 113 aa, Homo sapiens [sequence omitted]

SEQ ID NO: 1541 - protein, 111 aa, Homo sapiens
MRMSLADSLACSVCVALTAAARLLRSRPSSCSSFSWISGTSSSPSFLGSFTSLLGSSLSSLGDSLLGRGTLGNFWEVLISTSTSSWADFSSLVSTSPKVRVPLRPIFTCFL

SEQ ID NO: 1542 - protein, 148 aa, Homo sapiens
  SITE (3): Xaa equals any of the naturally occurring L-amino acids
  SITE (37): Xaa equals any of the naturally occurring L-amino acids
  SITE (41): Xaa equals any of the naturally occurring L-amino acids
  SITE (43): Xaa equals any of the naturally occurring L-amino acids
  SITE (99): Xaa equals any of the naturally occurring L-amino acids
  SITE (121): Xaa equals any of the naturally occurring L-amino acids
GFXAAAAAAAVVAAAAAASVEGRQPPGLGAVGPAGRXAGSXGXRMPAGRVAGAVTGLGVSWLRGKNSGVPGAALPPAAPSVASLVAHSGPAVGPPLSPXSVPQGGYSKSGLPLQDAGSPWXHCRGTDCGSSMLNGVEAGLAAAASCCH

SEQ ID NO: 1543 - protein, 191 aa, Homo sapiens
  SITE (180): Xaa equals any of the naturally occurring L-amino acids
  SITE (181): Xaa equals any of the naturally occurring L-amino acids
  SITE (190): Xaa equals any of the naturally occurring L-amino acids
MSSNTMLQKTLLILISFSVVTWMIFIISQNFTKLWSALNLSISVHYWNNSAKSLFPKTSLIPLKPLTETELRIKEIIEKLDQQIPPRPFTHVNTTTSATHSTATILNPRDTYCRGDQLDILLEVRDHLGQRKQYGGDFLRARMSFPALTAGASGKVMDFTMAPTWQLHSGLGGPGLPGSXXYSPQVEGAXG

SEQ ID NO: 1544 - protein, 165 aa, Homo sapiens
  SITE (2): Xaa equals any of the naturally occurring L-amino acids
  SITE (5): Xaa equals any of the naturally occurring L-amino acids
  SITE (7): Xaa equals any of the naturally occurring L-amino acids
  SITE (28): Xaa equals any of the naturally occurring L-amino acids
  SITE (33): Xaa equals any of the naturally occurring L-amino acids
NXFAXWXQKDTLRIQWKKHSYPFVTFQXYSLIXHDYIPREIDRLSGDKNTAIVITFGQHFRPFPIDIFIRRAIGVQKAIERLFLRSPATKVIIKTENIREMHIETERFGDFHGYIHYLIMKDIFKDLNVGIIDAWDMTIAYGTDTIHPPDHVIGNQINMFLNYIC

SEQ ID NO: 1545 - protein, 303 aa, Homo sapiens
  SITE (176): Xaa equals any of the naturally occurring L-amino acids
  SITE (177): Xaa equals any of the naturally occurring L-amino acids
  SITE (179): Xaa equals any of the naturally occurring L-amino acids
  SITE (192): Xaa equals any of the naturally occurring L-amino acids
  SITE (294): Xaa equals any of the naturally occurring L-amino acids
  SITE (297): Xaa equals any of the naturally occurring L-amino acids
  SITE (302): Xaa equals any of the naturally occurring L-amino acids
MSSNTMLQKTLLILISFSVVTWMIFIISQNFTKLWSALNLSISVHYWNNSAKSLFPKTSLIPLKPLTETELRIKEIIEKLDQQIPPRPFTHVNTTTSATHSTATILNPRDTYCRGDQLDILLEVRDHLGQRKQYGGDFLRARMSSPALTAGASGKVMDFNNGTYLVSFTLFWEGQXXLXLLLIHPSEGASAXWRARNQGYDKIIFKGKFVNGTSHVFTECGLTLNSNAELCEYLDDRDQEAFYCMKPQHMPCEALTYMTTRNREVSYLTDKENSLFHRSKVGVEMMKDRKHIDXTNXNKREXI

SEQ ID NO: 1546 - protein, 1 aa, Homo sapiens
M

SEQ ID NO: 1547 - protein, 547 aa, Homo sapiens
MSSNTMLQKTLLILISFSVVTWMIFIISQNFTKLWSALNLSISVHYWNNSAKSLFPKTSLIPLKPLTETELRIKEIIEKLDQQIPPRPFTHVNTTTSATHSTATILNPRDTYCRGDQLDILLEVRDHLGQRKQYGGDFLRARMSSPALTAGASGKVMDFNNGTYLVSFTLFWEGQVSLSLLLIHPSEGASALWRARNQGYDKIIFKGKFVNGTSHVFTECGLTLNSNAELCEYLDDRDQEAFYCMKPQHMPCEALTYMTTRNREVSYLTDKENSLFHRSKVGVEMMKDRKHIDVTNCNKREKIEETCQVGMKPPVPGGYTLQGKWITTFCNQVQLDTIKINGCLKGKLIYLLGDSTLRQWIYYFPKVVKTLKFFDLHETGIFKKHLLLDAERHTQIQWKKHSYPFVTFQLYSLIDHDYIPREIDRLSGDKNTAIVITFGQHFRPFPIDIFIRRAIGVQKAIERLFLRSPATKVIIKTENIREMHIETERFGDFHGYIHYLIMKDIFKDLNVGIIDAWDMTIAYGTDTIHPPDHVIGNQINMFLNYIC

SEQ ID NO: 1548 - protein, 246 aa, Homo sapiens
  SITE (30): Xaa equals any of the naturally occurring L-amino acids
  SITE (212): Xaa equals any of the naturally occurring L-amino acids
  SITE (220): Xaa equals any of the naturally occurring L-amino acids
  SITE (243): Xaa equals any of the naturally occurring L-amino acids
MASAVRGSRPWPRLGLQLQFAALLLGTLSXQVHTLRPENLLLVSTLDGSLHALSKQTGDLKWTLRDDPVIEGPMYVTEMAFLSDPADGSLYILGTQKQQGLMKLPFTIPELVHASPCRSSDGVFYTGRKQDAWFVVDPESGETQMTLTTEGPSTPRLYIGRTQYTVTMHDPRAPALRWNTTYRRYSTPPMDGSTGKYMSQLGVLREGPAAHXGTPGSGTXLLDTRNLGRALGNGPATPLGTKXRAW

SEQ ID NO: 1549 - protein, 473 aa, Homo sapiens
  SITE (321): Xaa equals any of the naturally occurring L-amino acids
  SITE (386): Xaa equals any of the naturally occurring L-amino acids
  SITE (391): Xaa equals any of the naturally occurring L-amino acids
MASAVRGSRPWPRLGLQLQFAALLLGTLSPQVHTLRPENLLLVSTLDGSLHALSKQTGDLKWTLRDDPVIEGPMYVTEMAFLSDPADGSLYILGTQKQQGLMKLPFTIPELVHASPCRSSDGVFYTGRKQDAWFVVDPESGETQMTLTTEGPSTPRLYIGRTQYTVTMHDPRAPALRWNTTYRRYSAPPMDGSPGKYMSHLASCGMGLLLTVDPGSGTVLWTQDLGVPVMGVYTWHQDGLRQLPHLTLARDTLHFLALRWGHIRLPASGPRDTATLFSTLDTQLLMTLYVGKDETGFYVSKALVHTGVALVPRGLTLAPAXGPTTDEVTLQVSGEREGSPSTAVRYPSGSVALPSQWLLIGHHELPPVLHTTMLRVHPTLGSGTAXTRPPXNTQAPAFFLELLSLSREKLWDSELHPEEKTPDSYLGLGPQDLLAASLTAVLLGGWILFVMRQQQPQVVEKQQETPLAPAAWG

SEQ ID NO: 1550 - protein, 98 aa, Homo sapiens
MCMRLCAALLPAPCTLRASWGVRGAQWGFSSLHEPGDPRGGSIWDEPPPPNAQASPQDPGGGHHSGKPGVGVGFGLSTFLLQIPPTHPSPKSSPLALA

SEQ ID NO: 1551 - protein, 98 aa, Homo sapiens; identical to SEQ ID NO: 1550

SEQ ID NO: 1552 - protein, 94 aa, Homo sapiens [sequence omitted]

SEQ ID NO: 1553 - protein, 49 aa, Homo sapiens
  SITE (1): Xaa equals any of the naturally occurring L-amino acids
  SITE (2): Xaa equals any of the naturally occurring L-amino acids
XXYDEKLIFIQILQTKATDKYSEQVSQVGPGAVLTPVIPALWEAEAGGS

SEQ ID NO: 1554 - protein, 141 aa, Homo sapiens
  SITE (140): Xaa equals any of the naturally occurring L-amino acids
MGPRGCALAHSLLPLLCQHVWTSPRYCRQCTREPRHCCPAPASAGVQYMCAYGCHHPTFAGVYTPSHTTVATSICTQTPPHQCCWSEHTHVVSTTPLLPAYMHMSMDPAATTQMKCFCRHPIRAFLPVEWEHLSPFNTAXA

SEQ ID NO: 1555 - protein, 141 aa, Homo sapiens [sequence omitted]

SEQ ID NO: 1556 - protein, 93 aa, Homo sapiens
MIVNISHEIWWFYKGKVPLHMLTCLLPCKTCLAPPSPSSVTVRPPQPCETVSPLKLFFFINYPVLHMSLLTVRKWTNTLGHEGGALINGISAL

SEQ ID NO: 1557 - protein, 59 aa, Homo sapiens
EEHGITSVIFLPQVHNLNLIIRKHQTNPNQETLYKIMTCDPQNLQGHEQQGKTEDKCTV

SEQ ID NO: 1558 - protein, 93 aa, Homo sapiens; identical to SEQ ID NO: 1556

SEQ ID NO: 1559 - protein, 100 aa, Homo sapiens
  SITE (62): Xaa equals any of the naturally occurring L-amino acids
  SITE (85): Xaa equals any of the naturally occurring L-amino acids
  SITE (88): Xaa equals any of the naturally occurring L-amino acids
  SITE (95): Xaa equals any of the naturally occurring L-amino acids
  SITE (99): Xaa equals any of the naturally occurring L-amino acids
MLLQRTRFLLLFFSFVSSFFLSLPSFSLFFLFLSLSLFCIHVAAKDMISSFFSLPFSFLSFXLSFLLPSFSFFYFFFFWLSFFFXSKXLALVPKXGMQXV

SEQ ID NO: 1560 - protein, 87 aa, Homo sapiens
  SITE (71): Xaa equals any of the naturally occurring L-amino acids
  SITE (86): Xaa equals any of the naturally occurring L-amino acids
MVVMASLQVEPAVGKEQLRERQGPELLGWVAGLAFVCLFACVGVGVAPCHSFDSEAASFLLLYSWCTPRLXSWLRDTPSPLASGTXP

SEQ ID NO: 1561 - protein, 49 aa, Homo sapiens
VRAMFGFLACVSSLRVMASSSSHVTSEDMILFLISCGIYVPHFLYPVDR

SEQ ID NO: 1562 - protein, 168 aa, Homo sapiens [sequence omitted]

SEQ ID NO: 1563 - protein, 200 aa, Homo sapiens
  SITE (140): Xaa equals any of the naturally occurring L-amino acids
  SITE (155): Xaa equals any of the naturally occurring L-amino acids
  SITE (165): Xaa equals any of the naturally occurring L-amino acids
  SITE (173): Xaa equals any of the naturally occurring L-amino acids
  SITE (194): Xaa equals any of the naturally occurring L-amino acids
  SITE (196): Xaa equals any of the naturally occurring L-amino acids
MAVYVGMLRLGRLCAGSSGVLGARAALSRSWQEARLQGVRFLSSREVDRMVSTPIGGLSYVQGCTKKHLNSKTVGQCLETTAQRVPEREALVVLHEDVRLTFAQLKEEVDKAASGLLSIGLCKGDRLGMWGPNSYAWVLXQLATGQAGIILVSVXPAYQAMEWSXSSKKWASXALVVPKQFKTKHNTTFLKQIXPXWRMP

SEQ ID NO: 1564 - protein, 100 aa, Homo sapiens
  SITE (3): Xaa equals any of the naturally occurring L-amino acids
  SITE (12): Xaa equals any of the naturally occurring L-amino acids
  SITE (57): Xaa equals any of the naturally occurring L-amino acids
  SITE (62): Xaa equals any of the naturally occurring L-amino acids
  SITE (80): Xaa equals any of the naturally occurring L-amino acids
MAXYVGMLRLGXLCAGSSGVLGARAALSRSWQEARLQGVRFLSSREVGSHGLHAHRXASATXRGAPKSILTARLWASAWXPQHRGSQNERPWSSSMKTSG

SEQ ID NO: 1565 - protein, 461 aa, Homo sapiens
  SITE (424): Xaa equals any of the naturally occurring L-amino acids
  SITE (459): Xaa equals any of the naturally occurring L-amino acids
MAVYVGMLRLGRLCAGSSGVLGARAALSRSWQEARLQGVRFLSSREVDRMVSTPIGGLSYVQGCTKKHLNSKTVGQCLETTAQRVPEREALVVLHEDVRLTFAQLKEEVDKAASGLLSIGLCKGDRLGMWGPNSYAWVLMQLATAQAGIILVSVNPAYQAMELEYVLKKVGCKALVFPKQFKTQQYYNVLKQICPEVENAQPGALKSQRLPDLTTVISVDAPLPGTLLLDEVVAAGSTRQHLDQLQYNQQFLSCHDPINIQFTSGTTGSPKGATLSHYNIVNNSNILGERLKLHEKTPEQLRMILPNPLYHCLGSVAGTMMCLMYGATLILASPIFNGKKALEAISRERGTFLYGTPTMFVDILNQPDFSSYDISTMCGGVIAGSPAPPELIRAIINKINMKDLVVAYGTTENSPVTFAHFPEXTPKPLDKEKRAEYASHGGEPLTKTSKSHLPSPSWXGS

SEQ ID NO: 1566 - protein, 177 aa, Homo sapiens
  SITE (121): Xaa equals any of the naturally occurring L-amino acids
  SITE (122): Xaa equals any of the naturally occurring L-amino acids
MKVLATSFVLGSLGLAFYLPLVVTTPKTLAIPEKLQEAVGKVIINATTCTVTCGLGYKEETVCEVGPDGVRRKCQTRRLECLTNWICGMLHFTILIGKEFELSCLSSDILEFGQEAFRFTXXLARGVISTDDEVFKPFQANSHFVKFKYAQEYDSGTYRCDVQLVKNLRLVKSSILG

SEQ ID NO: 1567 - protein, 255 aa, Homo sapiens
MKVLATSFVLGSLGLAFYLPLVVTTPKTLAIPEKLQEAVGKVIINATTCTVTCGLGYKEETVCEVGPDGVRRKCQTQRLECLTNWICGMLHFTILIGKEFELSCLSSDILEFGQEAFRFTWRLARGVISTDDEVFKPFQANSHFVKFKYAQEYDSGTYRCDVQLVKNLRLVKRLYFGLRVLPPNLVNLNFHQSLTEDQKLIDEGLEVNLDSYSKPHHPKWKKKVASALGIGIAIGVVGGVLVRIVLCALRGGLQQ

SEQ ID NO: 1568 - protein, 255 aa, Homo sapiens
MKVLATSFVLGSLGLAFYLPLVVTTPKTLAIPEKLQEAVGKVIINATTCTVTCGLGYKEETVCEVGPDGVRRKCQTRRLECLTNWICGMLHFTILIGKEFELSCLSSDILEFGQEAFRFTWRLARGVISTDDEVFKPFQANSHFVKFKYAQEYDSGTYRCDVQLVKNLRLVKRLYFGLRVLPPNLVNLNFHQSLTEDQKLIDEGLEVNLDSYSKPHHPKWKKKVASALGIGIAIGVVGGVLVRIVLCALRGGLQQ

SEQ ID NO: 1569 - protein, 52 aa, Homo sapiens
  SITE (46): Xaa equals any of the naturally occurring L-amino acids
MVPIFLLKCLLLHVPLCMSSNLSFHSSHHLHIFLPSFSSHLPRPLXIPPLSP

SEQ ID NO: 1570 - protein, 1134 aa, Homo sapiens
VLFRPQAQRPPSCVGGSAVRRWQGQPQPQRPGEEKAAAAILGGPGGGEEEKEEGGGRAWLRLLEELAAARPGEPALMSSSPLSKKRRVSGPDPKPGSNCSPAQSVLSEVPSVPTNGMAKNGSEADIDEGLYSRQLYVLGHEAMKRLQTSSVLVSGLRGLGVEIAKNIILGGVKAVTLHDQGTAQWADLSSQFYLREEDIGKNRAEVSQPRLAELNSYVPVTAYTGPLVEDFLSGFQVVVLTNTPLEDQLRVGEFCHNRGIKLVVADTRGLFGQLFCDFGEEMILTDSNGEQPLSAMVSMVTKDNPGVVTCLDEARHGFESGDFVSFSEVQGMVELNGNQPMEIKVLGPYTFSICDTSNFSDYIRGGIVSQVKVPKKISFKSLVASLAEPDFVVTDFAKFSRPAQLHIGFQALHQFCAQHGRPPRPRNEEDAAELVALAQAVNARALPAVQQNNLDEDLIRKLAYVAAGDLAPINAFIGGLAAQEVMKACSGKFMPIMQWLYFDALECLPEDKEVLTEDKCLQRQNRYDGQVAVFGSDLQEKLGKQKYFLVGAGAIGCELLKNFAMIGLGCGEGGEIIVTDMDTIEKSNLNRQFLFRPWDVTKLKSDTAAAAVRQMNPHIRVTSHQNRVGPDTERIYDDDFFQNLDGVANALDNVDARMYMDRRCVYYRKPLLESGTLGTKGNVQVVIPFLTESYSSSQDPPEKSIPICTLKNFPNAIEHTLQWARDEFEGLFKQPAENVNQYLTDPKFVERTLRLAGTQPLEVLEAVQRSLVLQRPQTWADCVTWACHHWHTQYSNNIRQLLHNFPPDQLTSSGAPFWSGPKRCPHPLTFDVNNPLHLDYVMAAANLFAQTYGLTGSQDRAAVATFLQSVQVPEFTPKSGVKIHVSDQELQSANASVDDSRLEELKATLPSPDKLPGFKMYPIDFEKDDDSNFHMDFIVAASNLRAENYDIPSADRHKSKLIAGKIIPAIATTTAAVVGLVCLELYKVVQGHRQLDSYKNGFLNLALPFFGFSEPLAAPRHQYYNQEWTLWDRFEVQGLQPNGEEMTLKQFLDYFKTEHKLEITMLSQGVSMLYSFFMPAAKLKERLDQPMTEIVSRVSKRKLGRHVRALVLELCCNDESGEDVEVPYVRYTIR

SEQ ID NO: 1571 - protein, 125 aa, Homo sapiens
MVPIFLLKCLLLHVPLCMSSNLSFHSSHHLHIFLPSFSSHLPRPLYIPPLSPFYIFSISPHIFPLCPHLCIPPNFPSIYLFYSPFPPCILCVPPILLYIILPKIFTSPILISPSPLSPNIFISVP

SEQ ID NO: 1572 - protein, 125 aa, Homo sapiens; identical to SEQ ID NO: 1571

SEQ ID NO: 1573 - protein, 124 aa, Homo sapiens
  SITE (63): Xaa equals any of the naturally occurring L-amino acids
  SITE (86): Xaa equals any of the naturally occurring L-amino acids
MVVAVLLGFVAMVLSVVGMKCTRVGDSNPIAKGRVAIAGGALFILAGLCTLTAVSWYATLVTXEFFNPSTPVNARYEFGPALFVGXDSAGLAVLSGSFLCCTCPEPERPNSSPQALSAWTLCCC

SEQ ID NO: 1574 - protein, 97 aa, Homo sapiens
  SITE (49): Xaa equals any of the naturally occurring L-amino acids
NSARDQASGESIHHRTSPSLPRTFLGQLHSGLLHHLPCDHISHHVPRSXERSSASPSSLTLRGKVTETKSDEMTAMYTAVKGREGRNDTNGRELLGN

SEQ ID NO: 1575 - protein, 128 aa, Homo sapiens
MVVAVLLGFVAMVLSVVGMKCTRVGDSNPIAKGRVAIAGGALFILAGLCTLTAVSWYATLVTQEFFNPSTPVNARYEFGPALFVGWASAGLAVLGGSFLCCTCPEPERPNSSPQPYRPGPSAAAREYV

SEQ ID NO: 1576 - protein, 100 aa, Homo sapiens
MVRTRALFYIFFQLSLTSGLIEDSCILIIIYLFFFRWCLALSPMLECSGVTLAHCNHHLLGRLRQENRLNLGGGDCSELRLHHCTLACVTSKTLSHTHTK

SEQ ID NO: 1577 - protein, 100 aa, Homo sapiens; identical to SEQ ID NO: 1576

SEQ ID NO: 1578 - protein, 118 aa, Homo sapiens
CRGDIQIRDKGEAMLRKTLDRAHFTPPNRYIWIYPFSASSFSTIKNVTILNAHKSHSSVTFCECSTIFSFSMTFQPQAEKTVYSLTQRLKRIFYYFKYYTFRTITCLRKLSQNVDLVK

SEQ ID NO: 1579 - protein, 181 aa, Homo sapiens
  SITE (132): Xaa equals any of the naturally occurring L-amino acids
  SITE (139): Xaa equals any of the naturally occurring L-amino acids
  SITE (168): Xaa equals any of the naturally occurring L-amino acids
  SITE (170): Xaa equals any of the naturally occurring L-amino acids
  SITE (181): Xaa equals any of the naturally occurring L-amino acids
MNLSTALLFLNLLFLLDGWITSFNVDGLCIAVAVLLHFFLLATFTWMGLEAIHMYIALVKVFNTYIRRYILKFCIIGWGLPALVVSVVLASRNNNEVYGKESYGKEKGDEFCWIQDPVIFYVTCAGYFGVMXFLNIAMXIVVMVQICGRNGKRSNRTLREEVVRNLRXVXSLTFLVGMTWX

SEQ ID NO: 1580 - protein, 320 aa, Homo sapiens
  SITE (168): Xaa equals any of the naturally occurring L-amino acids
MNLSTALLFLNLLFLLDGWITSFNVDGLCIAVAVLLHFFLLATFTWMGLEAIHMYIALVKVFNTYIRRYILKFCIIGWGLPALVVSVVLASRNNNEVYGKESYGKEKGDEFCWIQDPVIFYVTCAGYFGVMFFLNIAMFIVVMVQICGRNGKRSNRTLREEVLRNLRXVVSLTFLLGMTWGFAFFAWGPLNIPFMYLFSIFNSLQGLFIFIFHCAMKENVQKQWRRHLCCGRFRLADNSDWSKTATNIIKKSSDNLGKSLSSSSIGSNSTYLTSKSKSSSTTYFKRNSHTDNVSYEHSFNKSGSLRQCFHGQVLVKTGPC

SEQ ID NO: 1581 - protein, 131 aa, Homo sapiens
NIFLEWILRRILSLWRGTFLMHGRAGVNRISYWPADPEISLLTEASSSEDAKLDAKAVERLKSNSRAHVCVLLQPLVCYMVQFVEETSYKCDFIQKITKTLPDANTDFYYECKQERIKEYEMLKKKKKKKT

SEQ ID NO: 1582 - protein, 87 aa, Homo sapiens
MTGQIPRLSKVNLFTLLSLWMELFPAEAQRQKSQKNEEGKHGPLGDNEERTRVSTDKRQKTMFCLFENDCKCKALRVMIRSMSRSVP

SEQ ID NO: 1583 - protein, 87 aa, Homo sapiens; identical to SEQ ID NO: 1582

SEQ ID NO: 1584 - protein, 113 aa, Homo sapiens
MSPSPRWGFLCVLFTAVHPAPSTAPVQDKCPVNTWEAMQASSQQLLQTDPRPKPFLLPPLPPLLLISAGTEVSSLVFQKSPLHTQPEGAIKTAGQPTSVHSKVLSKGSLLLGE

SEQ ID NO: 1585 - protein, 94 aa, Homo sapiens [sequence omitted]

SEQ ID NO: 1586 - protein, 133 aa, Homo sapiens
HQAIKPGYSAENVAHTDHTLGCVTIVWCTCWKNSSMLLGDIISVGNMPLTDFFFFLFAVGLGQLIQQSIFFFFLSPNLNRSKMCSGIPGNRCVCKVKNRLFRNSLFRYLHPASHVKYLSLKGLRCTSFISYFS

SEQ ID NO: 1587 - protein, 94 aa, Homo sapiens [sequence omitted]

SEQ ID NO: 1588 - protein, 215 aa, Homo sapiens
  SITE (116): Xaa equals any of the naturally occurring L-amino acids
MELSCPGSRCPVQEQRARWERKRACTARELLETERRYQEQLGLVATYFLGILKAKGTLRPPERQALFGSWELIYGASQELLPYLEGGCWGQGLEGFCRHLELYNQFAANSERSQTXLQEQLKKNKGFRKFVRLQEGRPEFGGLQLQDLLPLPLQRLQQYENLVVALAENTGPNSPDHQQLTRRFLLLGNAGWRLPLLYSFLILTSNNVWYDPIFH

SEQ ID NO: 1589 - protein, 69 aa, Homo sapiens
EILLKKKNQETKSNPTKPQMNQPLTQMRGFGTDKLCAVSMARHLSRLQLCKCGYFYVVYSFYHLFFHWI

SEQ ID NO: 1590 - protein, 211 aa, Homo sapiens
  SITE (21): Xaa equals any of the naturally occurring L-amino acids
  SITE (104): Xaa equals any of the naturally occurring L-amino acids
MSGMTLSSTDMYTVSLLLCLXFKKSDPDPGPFQNNLFHNHGTQSQSCMGSKVGDVIPGAARLISETAQRVHTIGQKQKNDQHLRRVQALLSGRQAKGLTSGRWXLRQGWLLVVPPHGEPRPRMFFLFTDVLLMAKPRPPLHLLRSGTFACKALYPMAQCHLSRVFGHSGGPCGGLLSLSFPREKLLLMSTDQEELSRWYHSLTWAISSQKN

SEQ ID NO: 1591 - protein, 349 aa, Homo sapiens
  SITE (183): Xaa equals any of the naturally occurring L-amino acids
  SITE (191): Xaa equals any of the naturally occurring L-amino acids
  SITE (192): Xaa equals any of the naturally occurring L-amino acids
  SITE (334): Xaa equals any of the naturally occurring L-amino acids
  SITE (344): Xaa equals any of the naturally occurring L-amino acids
  SITE (345): Xaa equals any of the naturally occurring L-amino acids
  SITE (348): Xaa equals any of the naturally occurring L-amino acids
MFLDRPQQWLQLVLLPPALFIPSTENEEQRLASARAVPRNVQPYVVYEEVTNVWINVHDIFYPFPQSEGEDELCFLRANECKTGFCHLYKVTAVLKSQGYDWSEPFSPGEDEFKCPIKEEIALTSGEWEVLARHGSKIWVNEETKLVYFQGTKDTPLEHHLYVVSYEAAGEIVRLTTPGFSHXCSMSQNFXXFVSHITAQVAAASAGNQAGGTEWPAGPSEALCPAQRWPAPRSRCLHRPDAFYPFLNALGFYVRCFLVAETERWWSRASPSSPRLLGGGGHTLMGTGEARRDSEERAAFRLGLPVTSQSPGPASHRPQHPSMQLPVPPGQPPXLDVCVLFGGXXFIXI

SEQ ID NO: 1592 - protein, 144 aa, Homo sapiens
APFLPKPEQRVMRAPQEKRPGPAGGTTCGQPSCPQAFRQALKRTELPRSAGQWRLSPPQPSRPATCVCLTRTHQGFRGWELNHPHLRVIFPSPLPSPPRALPGAGKKKSKKKRKKKKRNKPPLHIMERKYFCRFLFFYNYAWKK

SEQ ID NO: 1593 - protein, 497 aa, Homo sapiens
  SITE (183): Xaa equals any of the naturally occurring L-amino acids
MFLDRPQQWLQLVLLPPALFIPSTENEEQRLASARAVPRNVQPYVVYEEVTNVWINVHDIFYPFPQSEGEDELCFLRANECKTGFCHLYKVTAVLKSQGYDWSEPFSPGEDEFKCPIKEEIALTSGEWEVLARHGSKIWVNEETKLVYFQGTKDTPLEHHLYVVSYEAAGEIVRLTTPGFSHXCSMSQNFDMFVSHYSSVSTPPCVHVYKLSGPDDDPLHKQPRFWASMMEAASCPPDYVPPEIFHFHTRSDVRLYGMIYKPHALQPGKKHPTVLFVYGGPQVQLVNNSFKGIKYLRLNTLASLGYAVVVIDGRGSCQRGLRFEGALKNQMGQVEIEDQVEGLQFVAEKYGFIDLSRVAIHGWSYGGFLSLMGLIHKPQVFKVAIAGAPVTVWMAYDTGYTERYMDVPENNQHGYEAGSVALHVEKLPNEPNRLLILHGFLDENVHFFHTNFLVSQLIRAGKPYQLQIYPNERHSIRCPESGEHYEVTLLHFLQEYL

SEQ ID NO: 1594 - protein, 497 aa, Homo sapiens
MFLDRPQQWLQLVLLPPALFIPSTENEEQRLASARAVPRNVQPYVVYEEVTNVWINVHDIFYPFPQSEGEDELCFLRANECKTGFCHLYKVTAVLKSQGYDWSEPFSPGEDEFKCPIKEEIALTSGEWEVLARHGSKIWVNEETKLVYFQGTKDTPLEHHLYVVSYEAAGEIVRLTTPGFSHSCSMSQNFDMFVSHYSSVSTPPCVHVYKLSGPDDDPLHKQPRFWASMMEAASCPPDYVPPEIFHFHTRSDVRLYGMIYKPHALQPGKKHPTVLFVYGGPQVQLVNNSFKGIKYLRLNTLASLGYAVVVIDGRGSCQRGLRFEGALKNQMGQVEIEDQVEGLQFVAEKYGFIDLSRVAIHGWSYGGFLSLMGLIHKPQVFKVAIAGAPVTVWMAYDTGYTERYMDVPENNQHGYEAGSVALHVEKLPNEPNRLLILHGFLDENVHFFHTNFLVSQLIRAGKPYQLQIYPNERHSIRCPESGEHYEVTLLHFLQEYL

SEQ ID NO: 1595 - protein, 180 aa, Homo sapiens
MTSVSQASLDVSMIIIISLGAICAVLLVIMVLFATRCNREKKDTRSYNCRVAESTYQHHPKRPSRQIHKGDITLVPTINGTLPIRSHHRSSPSSSPTLERGQMGSRQSHNSHQSLNSLVTISSNHVPENFSLELTHATPAVERLSASFNASPGAISAKTKFSRKQIFQELQICPSRHGQI

SEQ ID NO: 1596 - protein, 240 aa, Homo sapiens
MTSVSQASLDVSMIIIISLGAICAVLLVIMVLFATRCNREKKDTRSYNCRVAESTYQHHPKRPSRQIHKGDITLVPTINGTLPIRSHHRSSPSSSPTLERGQMGSRQSHNSHQSLNSLVTISSNHVPENFSLELTHATPAVEVSQLLSMLHQGQYQPRPSFRGNKYSRSYRYALQDMDKFSLKDSGRGDSEAGDSDYDLGRDSPIDRLLGEGFSDLFLTDGRIPASYETLHGGVQGPGTL

SEQ ID NO: 1597 - protein, 447 aa, Homo sapiens
MTSVSQASLDVSMIIIISLGAICAVLLVIMVLFATRCNREKKDTRSYNCRVAESTYQHHPKRPSRQIHKGDITLVPTINGTLPIRSHHRSSPSSSPTLERGQMGSRQSHNSHQSLNSLVTISSNHVPENFSLELTHATPAVEVSQLLSMLHQGQYQPRPSFRGNKYSRSYRYALQDMDKFSLKDSGRGDSEAGDSDYDLGRDSPIDRLLGEGFSDLFLTDGRIPAAMRLCTEECRVLGHSDQCWMPPLPSPSSDYRSNMFIPGEEFPTQPQQQHPHQSLEDDAQPADSGEKKKSFSTFGKDSPNDEDTGDTSTSSLLSEMSSVFQRLLPPSLDTYSECSEVDRSNSLERRKGPLPAKTVGYPQGVAAWAASTHFQNPTTNCGPPLGTHSSVQPSSKWLPAMEEIPENYEEDDFDNVLNHLNDGKHELMDASELVAEINKLLQDVRQS

SEQ ID NO: 1598 - protein, 95 aa, Homo sapiens
  SITE (46): Xaa equals any of the naturally occurring L-amino acids
MTSYILISFVLLIGVGCIEKDQSCPVFGGRKRLHLLFVGGQLRQVXLGAPRPPGGQDPSHQRLGRGELPLVRQHHRDLHHRGPHQEGLQVHHQHE

SEQ ID NO: 1599 - protein, 152 aa, Homo sapiens
  SITE (1): Xaa equals any of the naturally occurring L-amino acids
XPSWWGPRWCRSSCGVARTRVVHPVRVADGLDLALLEVGELPAGHALLAVLVVELHVAARLDPANYPSLLLGDGRHDHLGRGPEVGCPVAEHHAGGLIDASGDGVDGGFHINHRDPFPEDSGFASDALNTAHGIQERSDLQGRPAVTEKTRH

SEQ ID NO: 1600 - protein, 82 aa, Homo sapiens
MRTWASLALGLTRALGGMGSFLLRILGWSWAMGSRSRARWPRGRLGFTSMLSCMRQCSVCRMIMSLVEVLVATSQVVKLWSR

SEQ ID NO: 1601 - protein, 306 aa, Homo sapiens
  SITE (171): Xaa equals any of the naturally occurring L-amino acids
  SITE (180): Xaa equals any of the naturally occurring L-amino acids
  SITE (182): Xaa equals any of the naturally occurring L-amino acids
  SITE (188): Xaa equals any of the naturally occurring L-amino acids
  SITE (208): Xaa equals any of the naturally occurring L-amino acids
  SITE (210): Xaa equals any of the naturally occurring L-amino acids
  SITE (211): Xaa equals any of the naturally occurring L-amino acids
  SITE (218): Xaa equals any of the naturally occurring L-amino acids
  SITE (219): Xaa equals any of the naturally occurring L-amino acids
MALRLLRRAARGAAAAALLRLKASLAADIPRLGYSSSSHHKYIPRRAVLYVPGNDEKKIKKIPSLNVDCAVLDCEDGVAANKKNEARLRIVKTLEDIDLGPTEKCVRVNSVSSGLAEEDLETLLQSRVLPSSLMLPKVESPEEIQWAVCEETLKVGPQVGLFLDAVRFWRXRLSSHIGAXSXKETLDXLYARQKIVVIAKAFGLQAVXLXXIDFRDGXXLLRQSREGAAMGFTGKQVIHPNQIAVVQEQFSPSPEKIKWAEELIAAFKEHQQLGKGAFTFQGSMIDMPLLKQAQNTVTLATSIKEK

SEQ ID NO: 1602 - protein, 92 aa, Homo sapiens
MEDRLLLILVFPLLWFPVAVFQLVLLLPFLLIHSLNCLEWRHLFSAYRVHILAWLAYPCFCVSLRVRHCIELFIQIVLSLPQCCGIGGVPIL

SEQ ID NO: 1603 - protein, 69 aa, Homo sapiens
  SITE (59): Xaa equals any of the naturally occurring L-amino acids
MPTSILLTWHLLTWHLLGCHKTDKSFHVRLDTCQGGVSKLGHRQHPRPGHWVEETVLGXTRREGPGLFP

SEQ ID NO: 1604 - protein, 69 aa, Homo sapiens
MPTSILLTWHLLTWHLLGCHKTDKSFHVRLDTCQGGVSKLGHRQHPRPGHWVEETVLGRSRREGPGLFP

SEQ ID NO: 1605 - protein, 76 aa, Homo sapiens
  SITE (67): Xaa equals any of the naturally occurring L-amino acids
  SITE (74): Xaa equals any of the naturally occurring L-amino acids
MIWRSRAGAELFSLMALWEWIALSLHCWVLAVAAVSDQHATSPFDWLLSDKGPFHRSQEYTDFVDRXRQGFSTXYK

SEQ ID NO: 1606 - protein, 201 aa, Homo sapiens [sequence omitted]

SEQ ID NO: 1607 - protein, 23 aa, Homo sapiens
MSACTATSSWPGPSPPSSARCSS

SEQ ID NO: 1608 - protein, 219 aa, Homo sapiens
  SITE (205): Xaa equals any of the naturally occurring L-amino acids
  SITE (212): Xaa equals any of the naturally occurring L-amino acids
YFSVGQRQCWISFTLTAQNSICCLPCNLRTNTHLLYNPRRGDIKLTQLAMLLAEISSVAHQKDGSFCPIVMCGDFNSVPGSPLYSFIKEGKLNYEGLPIGKVSGQEQSSRGQRILSIPIWPPNLGISQNCVYEVQQVPKVEKTDSDLTQTQLKQTEVLVTAEKLSSNLQHHFSLSSVYSHYFPDTGIPEVTTCHSRSAITVDYIXLLCRKGXCCWAPRS

SEQ ID NO: 1609 - protein, 267 aa, Homo sapiens
MLIAVGIHLLLLMFEVLVCDRVERGTHFWLLVFMPLFFVSPVSVAACVWGFRHDRSLELEILCSVNILQFIFIALKLDRIIHWPWLVVFVPLWILMSFLCLVVLYYIVWSLLFLRSLDVVAEQRRTHVTMAISWITIVVPLLTFEVLLVHRLDGHNTFSYVSIFVPLWLSLLTLMATTFRRKGGNHWWFGIRRDFCQFLLEIFPFLREYGNISYDLHHEDSEDAEETSVPEAPKIAPIFGKKARVVITQSPGKYVPPPPKLNIDMPD

SEQ ID NO: 1610 - protein, 123 aa, Homo sapiens
  SITE (92): Xaa equals any of the naturally occurring L-amino acids
  SITE (93): Xaa equals any of the naturally occurring L-amino acids
  SITE (108): Xaa equals any of the naturally occurring L-amino acids
  SITE (117): Xaa equals any of the naturally occurring L-amino acids
  SITE (122): Xaa equals any of the naturally occurring L-amino acids
MITTAGKVVVTILLGSSGMMLPSLTSSVYFFVFLGLCTWWSWCRTFDPLLFSCLCVLLAIFTAGHLIGLYLYQFQFFQEAVPPNDYYASFGXXEEFFYSTGTELIIPXRLLQAHHNXTYKQXY

SEQ ID NO: 1611 - protein, 52 aa, Homo sapiens
  SITE (37): Xaa equals any of the naturally occurring L-amino acids
PGLRKNRPSVPRRSSPGRISGLSSVAWNPDHSISVFXLAELTSRAQLAVGVS

SEQ ID NO: 1612 - protein, 125 aa, Homo sapiens
MFRRLASVASKLKEFIGNMITTAGKVVVTILLGSSGMMLPSLTSSVYFFVFLGLCTWWSWCRTFDPLLFSCLCVLLAIFTAGHLIGLYLYQFQFFQEAVPPNDYYASFGQSEEFFYSTGTELIIP

SEQ ID NO: 1613 - protein, 107 aa, Homo sapiens
MITTAGKVVVTILLGSSGMMLPSLTSSVYFFVFLGLCTWWSWCRTFDPLLFSCLCVLLAIFTAGHLIGLYLYQFQFFQEAVPPNDYYASFGQSEEFFYSTGTELIIP

SEQ ID NO: 1614 - protein, 115 aa, Homo sapiens
MAVAVLLCGCIVATVSFFWEESLTQHVAGLLFLMTGIFCTISLCTYAASISYDLNRLPKLIYSLPADVEHGYSWSIFCAWCSLGFIVAAGGLCIAYPFISRTKIAQLKSGRDSTV

SEQ ID NO: 1615 - protein, 182 aa, Homo sapiens
  SITE (88): Xaa equals any of the naturally occurring L-amino acids
  SITE (119): Xaa equals any of the naturally occurring L-amino acids
  SITE (120): Xaa equals any of the naturally occurring L-amino acids
  SITE (149): Xaa equals any of the naturally occurring L-amino acids
  SITE (151): Xaa equals any of the naturally occurring L-amino acids
  SITE (154): Xaa equals any of the naturally occurring L-amino acids
MVIYVTLALWPQIIQKKANGNCFWHFGLLLKLGFLLLFICFLAYSQGAFEKIFSLWPLSKCFELKGNVYEWWFRWRLDRYVVFHGMLXAFIYLALQKRQILSEGKGEPLFSNKISNFLXXISVVSFLTYSIWASSCKNKAECNELHPSXSXVQXLAFILIRNIPGYARQFTVHFLLGLEKFH

SEQ ID NO: 1616 - protein, 83 aa, Homo sapiens
  SITE (17): Xaa equals any of the naturally occurring L-amino acids
  SITE (18): Xaa equals any of the naturally occurring L-amino acids
IWAIDVFAFCLIFFYKXXVRGIHLFICCTDLIMILMFERLHLFAFTICGVKYIFCSQYMKIWSNLNSKQTFCGCLFLYWQSIN

SEQ ID NO: 1617 - protein, 182 aa, Homo sapiens
  SITE (119): Xaa equals any of the naturally occurring L-amino acids
  SITE (120): Xaa equals any of the naturally occurring L-amino acids
  SITE (149): Xaa equals any of the naturally occurring L-amino acids
  SITE (151): Xaa equals any of the naturally occurring L-amino acids
  SITE (154): Xaa equals any of the naturally occurring L-amino acids
MVIYVTLALWPQIIQKKANGNCFWHFGLLLKLGFLLLFICFLAYSQGAFEKIFSLWPLSKCFELKGNVYEWWFRWRLDRYVVFHGMLFAFIYLALQKRQILSEGKGEPLFSNKISNFLXXISVVSFLTYSIWASSCKNKAECNELHPSXSXVQXLAFILIRNIPGYARQFTVHFLLGLEKFH

SEQ ID NO: 1618 - protein, 95 aa, Homo sapiens
MRSQHITWCLLFSSPLATLPAALPLGACAAVFTVIGSEKQSECSLLRESRAKYHGCTHGQISSSLKQHPRWMYSHQEDLKVWSLVEKKQKQCMGD

SEQ ID NO: 1619 - protein, 95 aa, Homo sapiens; identical to SEQ ID NO: 1618

SEQ ID NO: 1620 - protein, 706 aa, Homo sapiens
MLHALQHPCIVALIGISIHPLCFALELAPLSSLNTVLSENARDSSFIPLGHMLTQKIAYQIASGLAYLHKKNIIFCDLKSDNILVWSLDVKEHINIKLSDYGISRQSFHEGALGVEGTPGYQAPEIRPRIVYDEKVDMFSYGMVLYELLSGQRPALGHHQLQIAKKLSKGIRPVLGQPEEVQFRRLQALMMECWDTKPEKRPLALSVVSQMKDPTFATFMYELCCGKQTAFFSSQGQEYTVVFWDGKEESRNYTVVNTEKGLMEVQRMCCPGMKVSCQLQVQRSLWTATEDQKIYIYTLKGMCPLNTPQQALDTPAVVTCFLAVPVIKKNSYLVLAGLADGLVAVFPVVRGTPKDSCSYLCSHTANRSKFSIADEDARQNPYPVKAMEVVNSGSEVWYSNGPGLLVIDCASLEICRRLEPYMAPSMVTSVVCSSEGRGEEVVWCLDDKANSLVMYHSTTYQLCARYFCGVPSPLRDMFPVRPLDTEPPAASHTANPKVPEGDSIADVSIMYSEELGTQILIHQESLTDYCSMSSYSSSPPRQAARSPSSLPSSPASSSSVPFSTDCEDSDMLHTPGAASDRSEHDLTPMDGETFSQHLQAVKILAVRDLIWVPRRGGDVIVIGLEKDSEAQRGRVIAVLKARELTPHGVLVDAAVVAKDTVVCTFENENTEWCLAVWRGWGAREFDIFYQSYEELGRLEACTRKRR

SEQ ID NO: 1621 - protein, 706 aa, Homo sapiens [sequence omitted]

SEQ ID NO: 1622 - protein, 196 aa, Homo sapiens
  SITE (171): Xaa equals any of the naturally occurring L-amino acids
  SITE (175): Xaa equals any of the naturally occurring L-amino acids
  SITE (177): Xaa equals any of the naturally occurring L-amino acids
  SITE (181): Xaa equals any of the naturally occurring L-amino acids
  SITE (185): Xaa equals any of the naturally occurring L-amino acids
  SITE (188): Xaa equals any of the naturally occurring L-amino acids
  SITE (189): Xaa equals any of the naturally occurring L-amino acids
  SITE (193): Xaa equals any of the naturally occurring L-amino acids
MSLLVDGDMNLSIIMTISSTLLALVLMPLCLWIYSWAWINTPIVQLLPLGTVTLTLCSTLIPIGLGVFIRYKYSRVADYIVKVSLWSLLVTLVVLFIMTGTMLGPELLASIPAAVYVIAIFMPLAGYASGYGLATLFHLPPNCKRTVCLETGSQNVQLCTAILKLAFHRIXRKHXHXSFAXCTFXVCXXGDFXFNL

SEQ ID NO: 1623 - protein, 69 aa, Homo sapiens [sequence omitted]

SEQ ID NO: 1624 - protein, 199 aa, Homo sapiens
FSGVCFAGIAGSMATLLHDAVMNPAEVVKQRLQMYNSQHRSAISCIRTVWRTEGLGAFYRSYTTQLTMNIPFQSIHFITYEFLQEQVNPHRTYNPQSHIISGGLAGALAAAATTPLDVCKTLLNTQENVALSLANISGRLSGMANAFRTVYQLNGLAGYFKGIQARVIYQMPSTAISWSVYEFFKYFLTKRQLENRAPY

SEQ ID NO: 1625 - protein, 69 aa, Homo sapiens [sequence omitted]

SEQ ID NO: 1626 - protein, 91 aa, Homo sapiens
  SITE (84): Xaa equals any of the naturally occurring L-amino acids
MARVLQLEPQTSACLLSLLCPALQEPGPASGTESAHFLRAHSRCGPGLPPPHVSSPQPTPPGPEAKVRGCMGARWWLGRAPGVXGVFRDTT

SEQ ID NO: 1627 - protein, 137 aa, Homo sapiens
  SITE (15): Xaa equals any of the naturally occurring L-amino acids
  SITE (39): Xaa equals any of the naturally occurring L-amino acids
AHCHISRSHCPTLRXKDTCGGWEPTSALGSSTLSHVPHXLLERRDLWRREAEARKQSQPDPAMPPGHTRMPENQRLETLTKLLQSQSQLLRELVLLPAGADSLRAQSHRAELDRKLVQVEEAIKIFSRPKVFVKMDD

SEQ ID NO: 1628 - protein, 95 aa, Homo sapiens
MAWAPACVQAQGLSCLCLFPDPSSCREWCCPLGMYLQVETRTSSRLHLKRAPGIRSWSLLVGKALHVPPQNPRTGSLTFKKDENETKYFLFFLLP

SEQ ID NO: 1629 - protein, 189 aa, Homo sapiens
  SITE (81): Xaa equals any of the naturally occurring L-amino acids
  SITE (163): Xaa equals any of the naturally occurring L-amino acids
VQLSVPAGMLHSLCVQLFITAGSLCATHSQCLSKADGARPSILYLTCPLHSPIKNGPQIRVEEADVSSSETALPRSRRDGXAKPGCETGCCMWLQALNIVTWRLPQHIVRSKPQEPEQQNSCHPQKPAPGTAVQIGRRSSQQWLLRTPLTQQRSPDACRSPEXALSALDMAGDTQVWPSQSLFAKLKVK

SEQ ID NO: 1630 - protein, 95 aa, Homo sapiens; identical to SEQ ID NO: 1628

SEQ ID NO: 1631 - protein, 303 aa, Homo sapiens
  SITE (224): Xaa equals any of the naturally occurring L-amino acids
  SITE (245): Xaa equals any of the naturally occurring L-amino acids
  SITE (250): Xaa equals any of the naturally occurring L-amino acids
  SITE (252): Xaa equals any of the naturally occurring L-amino acids
  SITE (255): Xaa equals any of the naturally occurring L-amino acids
  SITE (256): Xaa equals any of the naturally occurring L-amino acids
  SITE (257): Xaa equals any of the naturally occurring L-amino acids
  SITE (287): Xaa equals any of the naturally occurring L-amino acids
  SITE (301): Xaa equals any of the naturally occurring L-amino acids
MAAASAGATRLLLLLLMAVAAPSRARGSGCRAGTGARGAGAEGREGEACGTVGLLLEHSFEIDDSANFRKRGSLLWNQQDGTLSLSQRQLSEEERGRLRDVAALNGLYRVRIPRRPGALDGLEAGGYVSSFVPACSLVESHLSDQLTLHVDVAGNVVGVSVVTHPGGCRGHEVEDVDLELFNTSVQLQPPTTAPGPETAAFIERLEMEQAQKAKNPQEQKSFFXKYWMYIIPVVLFLMMSGAPDXGGQGXGXGGXXXGVVAGEGPSLSAFPSCKTQGGFPFCLEFPXCSSSPSPKKGFCLXPL

SEQ ID NO: 1632 - protein, 173 aa, Homo sapiens
  SITE (99): Xaa equals any of the naturally occurring L-amino acids
  SITE (118): Xaa equals any of the naturally occurring L-amino acids
  SITE (141): Xaa equals any of the naturally occurring L-amino acids
  SITE (164): Xaa equals any of the naturally occurring L-amino acids
  SITE (170): Xaa equals any of the naturally occurring L-amino acids
  SITE (172): Xaa equals any of the naturally occurring L-amino acids
  SITE (173): Xaa equals any of the naturally occurring L-amino acids
MAAASAGATRLLLLLLMAVAAPSRARGSGCRAGTGARGAGAEGREGEACGTVGLLLEHSFEIDDSANFRKRGSLLWNQQDGTLSLSQRQLSEEERGRLXDVAALNGLYRVRIPRRPGXLDGLEAGGYVSSFVPACSLVESXLSDQLTLHVDVAGNVVGRVGGDXPWGCRXHXX

SEQ ID NO: 1633 - protein, 158 aa, Homo sapiens
MAAASAGATRLLLLLLMAVAAPSRARGSGCRAGTGARGAGAEGREGEACGTVGLLLEHSFEIDDSANFRKRGSLLWNQQDGTLSLSQRQLSEEERGRLRDVAASYLDCGATRACGPLLCATLPVSLFKNIDDTLKCVNVLKSYSFQQPKATVVLARRS

SEQ ID NO: 1634 - protein, 158 aa, Homo sapiens; identical to SEQ ID NO: 1633

SEQ ID NO: 1635 - protein, 115 aa, Homo sapiens
MRSRKIPQQSRFFTPLFFLNLPILVVPLPSTDTSCSDFQYQVFKTSYPPSSVPPSLQSHKHWCSQIKISPKQCQRDPLSSFQARDMFSFQVLEKTGSMFTWNFSRGGAISFCIKL

SEQ ID NO: 1636 - protein, 115 aa, Homo sapiens; identical to SEQ ID NO: 1635

SEQ ID NO: 1637 - protein, 80 aa, Homo sapiens
MALGSMYLVLTLIVAKVLRGAEPCCGPLKNRVLRPCPLPVHCPLPIPSPAEGIPWVAYLPIRWFISCCPGHCIQIPMCTS

SEQ ID NO: 1638 - protein, 80 aa, Homo sapiens; identical to SEQ ID NO: 1637

SEQ ID NO: 1639 - protein, 81 aa, Homo sapiens
MRTNQSLCSFLLWSVPFHQAACPQAKDHPLEPSMHPEGTQLQSCSTMLGPRQLSSEKQPLLPPRSHLKSSPMLRACKGLTS

SEQ ID NO: 1640 - protein, 81 aa, Homo sapiens; identical to SEQ ID NO: 1639

SEQ ID NO: 1641 - protein, 53 aa, Homo sapiens
  SITE (52): Xaa equals any of the naturally occurring L-amino acids
MVFLSHLFGTKRLFLLLALIWASWHFSYMPADAWVDPGIPDRYLQAYLSIVXP

SEQ ID NO: 1642 - protein, 61 aa, Homo sapiens
MHVVHWSRLFLLKPPYSVHATFIPTGFLARFRTPGILDSCFFHSWPLLLSYFLSPQSPLLK

SEQ ID NO: 1643 - protein, 86 aa, Homo sapiens
MLTAVKMFRLSAVTLCAFSLTLHSGVQLCEQLVLRIALFQNCRAEDGFGLRVCWRRLMRSFCRSAKFWGSNDLRTWGSRFLWKDCT

SEQ ID NO: 1644 - protein, 86 aa, Homo sapiens; identical to SEQ ID NO: 1643

SEQ ID NO: 1645 - protein, 122 aa, Homo sapiens
  SITE (116): Xaa equals any of the naturally occurring L-amino acids
MGLLAFLKTQFVLHLLVGFVFVVSGLVINFVQLCTLALWPVSKQLYRRLNCRLAYSLWSQLVMLLEWWSCTECTLFTDQATVERFGKEHAIIILNHNFEIDFLCGWTMCERFGMLXSSKGPR

SEQ ID NO: 1646 - protein, 121 aa, Homo sapiens
GDFLWKTSRVDEKEAAQWLHKLYQEKDALQEIYNQKGMFPGEQFKPARRPWTLLNFLSWATILLSPLFSFVLGVFASGSPLLILTFLGFVGAASFGVRRLIGVTEIEKGSSYGNQEFKKKE

SEQ ID NO: 1647 - protein, 376 aa, Homo sapiens
  SITE (30): Xaa equals any of the naturally occurring L-amino acids
MGLLAFLKTQFVLHLLVGFVFVVSGLVINXVQLCTLALWPVSKQLYRRLNCRLAYSLWSQLVMLLEWWSCTECTLFTDQATVERFGKEHAVIILNHNFEIDFLCGWTMCERFGVLGSSKVLAKKELLYVPLIGWTWYFLEIVFCKRKWEEDRDTVVEGLRRLSDYPEYMWFLLYCEGTRFTETKHRVSMEVAAAKGLPVLKYHLLPRTKGFTTAVKCLRGTVAAVYDVTLNFRGNKNPSLLGILYGKKYEADMCVRRFPLEDIPLDEKEAAQWLHKLYQEKDALQEIYNQKGMFPGEQFKPARRPWTLLNFLSWATILLSPLFSFVLGVFASGSPLLILTFLGFVGAASFGVRRLIGVTEIEKGSSYGNQEFKKKE

SEQ ID NO: 1648 - protein, 164 aa, Homo sapiens
  SITE (76): Xaa equals any of the naturally occurring L-amino acids
  SITE (112): Xaa equals any of the naturally occurring L-amino acids
  SITE (146): Xaa equals any of the naturally occurring L-amino acids
MRTLVELGPWAGDFGPDLLLTLLFLLFLAHGVTLDGASANPTVSLQEFLMAEQSLPGTLLKLAAQGLGMQAACTLXRLCWAWELSDLHLLQSLMAQSCSSALRTSVPHGALXEAACTFCFHLTLLHLRHSPPAYSGPAVALLVTVXAYTAGPYVCFFNPALAAL

SEQ ID NO: 1649 - protein, 186 aa, Homo sapiens
MRTLVELGPWAGDFGPDLLLTLLFLLFLAHGVTLDGASANPTVSLQEFLMAEQSLPGTLLKLAAQGLGMQAACTLMRLCWAWELSDLHLLQSLMAQSCSSALRTSVPHGALLEAACTFCFHLTLLHLRHSPPAYSGPAVALLVTVTAYTAGPFTSAFFNPALAASVTFACSDTPYWSTCRCTGWAL

SEQ ID NO: 1650 - protein, 206 aa, Homo sapiens
  SITE (200): Xaa equals any of the naturally occurring L-amino acids
MVRLAAELLLLLGLLLLTLHITVLRGSGAADGPDAAAGNASQAQLQNNLNVGSDTTSETSFSLSKEAPREHLDHQAAHQPFPRPRFRQETGHPSLQRDFPRSFLLDLPNFPDLSKADINGQNPNIQVTIEVVDGPDSEADKDQHPENKPSWSVPSPDWRAWWQRSLSLARANSGDQDYQYDSTSDDSNFLNPPRGWDHTXPGHRDF

SEQ ID NO: 1651 - protein, 107 aa, Homo sapiens
  SITE (52): Xaa equals any of the naturally occurring L-amino acids
HFSKGKQQNKWEKDNGPHFTYFNTILTIFSSTNISPINKYKRGGGSIWGILXFYVLRKQKKLHYFCKVFIESRIIVHQAIVNMTWSYGVELRKNKVGSYSIFYFAKF

SEQ ID NO: 1652 - protein, 464 aa, Homo sapiens
MVRLAAELLLLLGLLLLTLHITVLRGSGAADGPDAAAGNASQAQLQNNLNVGSDTTSETSFSLSKEAPREHLDHQAAHQPFPRPRFRQETGHPSLQRDFPRSFLLDLPNFPDLSKADINGQNPNIQVTIEVVDGPDSEADKDQHPENKPSWSVPSPDWRAWWQRSLSLARANSGDQDYKYDSTSDDSNFLNPPRGWDHTAPGHRTFETKDQPEYDSTDGEGDWSLWSVCSVTCGNGNQKRTRSCGYACTATESRTCDRPNCPGIEDTFRTAATEVSLLAGSEEFNATKLFEVDTDSCERWMSCKSEFLKKYMHKVMNDLPSCPCSYPTEVAYSTADIFDRIKRKDFRWKDASGPKEKLEIYKPTARYCIRSMLSLESTTLAAQHCCYGDNMQLITRGKGAGTPNLISTEFSAELHYKVDVLPWIICKGDWSRYNEARPPNNGQKCTESPSDEDYIKQFQEAREY

SEQ ID NO: 1653 - protein, 158 aa, Homo sapiens [sequence omitted]

SEQ ID NO: 1654 - protein, 106 aa, Homo sapiens
  SITE (26): Xaa equals any of the naturally occurring L-amino acids
PTFSDQYLAPHPYSPQPPPYHELPHXHGQSQRVLCGCYVAHCGARLGRALLVCDWVSWPSCACSYSAWAQPTSCCHTGDCGHCDSHQQCLVPPPSLRGRQGTFDYF

SEQ ID NO: 1655 - protein, 158 aa, Homo sapiens [sequence omitted]

SEQ ID NO: 1656 - protein, 66 aa, Homo sapiens
MHRPEAMLLLLTLALLGGPTWAGKMYGPGGGKYFSTTEDYDHEITGLRVSVGLLLVKRFLEGVIYE

SEQ ID NO: 1657 - protein, 178 aa, Homo sapiens
MHRPEAMLLLLTLALLGGPTWAGKMYGPGGGKYFSTTEDYDHEITGLRVSVGLLLVKSVQVKLGDSWDVKLGALGGNTQEVTLQPGEYITKVFVAFQAFLRGMVMYTSKDRYFYFGKLDGQISSAYPSQEGQVLVGIYGQYQLLGIKSIGFEWNYPLEEPTTEPPVNLTYSANSPVGR

SEQ ID NO: 1658 - protein, 112 aa, Homo sapiens
  SITE (12): Xaa equals any of the naturally occurring L-amino acids
  SITE (52): Xaa equals any of the naturally occurring L-amino acids
  SITE (64): Xaa equals any of the naturally occurring L-amino acids
  SITE (67): Xaa equals any of the naturally occurring L-amino acids
  SITE (68): Xaa equals any of the naturally occurring L-amino acids
MTFCLFVLFCLXWSLALLPRVECSGAISAHCNLHLPGSGGFSCLSLLSSWDXRHAPPCPDNFCXFSXXGVSLCWQAGLEHLTRGPPASASQSTGITGVSHPAWPRMTFKRSN

SEQ ID NO: 1659 - protein, 122 aa, Homo sapiens
MTTASSLISPFFPLPPPAHFSQCRMTFCLFVLFCLRWSLALLPRVECSGAISAHCNLHLPGSSGFSCLSLLSSWDYRHAPPCPDNFCIFSRDGVSLCWPGWSRTPDLVVHPPRPPKALGLQA

SEQ ID NO: 1660 - protein, 65 aa, Homo sapiens
  SITE (24): Xaa equals any of the naturally occurring L-amino acids
MCKGLKNPEGLLLLLLLLLFTDTXNSHCLPPYLSCFLHERQPELQSVCISAAYVLAPLQNPVSSL

SEQ ID NO: 1661 - protein, 299 aa, Homo sapiens
  SITE (172): Xaa equals any of the naturally occurring L-amino acids
  SITE (174): Xaa equals any of the naturally occurring L-amino acids
GGEEEGEEGAEISGLGAGRRSAPIAVGLGFLGVGGRGGSDMEANGSQGTSGSANDSQHDPGKMFIGGLSWQTSPDSLRDYFSKFGEIRECMVMRDPTTKRSRGFGFVTFADPASVDKVLGQPHHELDSKTIDPKVAFPRRAQPKMVTRTKKIFVGGLSANTVVEDVKQYFEXFXKVEDAMLMFDKTTNRHRGFGFVTFENEDVVEKVCEIHFHEINNKMVECKKAQPKEVMFPPGTRGRARGLPYTMDAFMLGMGMLGESGQDRRSPWTGRAMEASTPNWVTYQWGKLLHLSKPQFPCL

SEQ ID NO: 1662 - protein, 97 aa, Homo sapiens [sequence omitted]

SEQ ID NO: 1663 - protein, 86 aa, Homo sapiens
  SITE (71): Xaa equals any of the naturally occurring L-amino acids
MLAAAPLHEQKQMIGTCYLVLKRWSDWMVLSFLPLLLSCDFEGSVSTPLSMMSTPSWLARSRACCWRLTTXSCCSCWSLQNPSMPR

SEQ ID NO: 1664 - protein, 86 aa, Homo sapiens; identical to SEQ ID NO: 1663
  SITE (71): Xaa equals any of the naturally occurring L-amino acids

SEQ ID NO: 1665 - protein, 49 aa, Homo sapiens
MKHSFLSSDLIWCVLSLLCLGVWFRETWTTLFGRTGLPRNQQCPRRKGL

SEQ ID NO: 1666 - protein, 49 aa, Homo sapiens; identical to SEQ ID NO: 1665

SEQ ID NO: 1667 - protein, 142 aa, Homo sapiens
  SITE (69): Xaa equals any of the naturally occurring L-amino acids
  SITE (76): Xaa equals any of the naturally occurring L-amino acids
  SITE (90): Xaa equals any of the naturally occurring L-amino acids
  SITE (108): Xaa equals any of the naturally occurring L-amino acids
MYVTLVFRVKGSRLVKPSLCLALLCPAFLVGVVRVAEYRNHWSDVLAGFLTGAAIATFLVTCVVHNFQXRPPSGRXLSPQSAYPRLPGPXFPHLHNGGDHPCPAGCRXGCESSAWMQPGGSHRAAFTGLALPWAGGRPHPKR

SEQ ID NO: 1668 - protein, 110 aa, Homo sapiens
MYVTLVFRVKGSRLVKPSLCLALLCPAFLVGVVRVAEYRNHWSDVLAGFLTGAAIATFLVTCVVHNFQSRPPSGRRLSPQSAYPRLPGPQFPHLHNGGDHPCPAGCQERL

SEQ ID NO: 1669 - protein, 159 aa, Homo sapiens [sequence omitted]

SEQ ID NO: 1670 - protein, 110 aa, Homo sapiens
MRWPCPTSKPAPPPVLWSHLCQHRWGLTPASTLLCWLLLFNLGTCLSFSHLKQNNNNSNTSKISFDPASLCWVIISLSFPPFPSKHLKRVVYTQHSPFPHYPLTPQPAAI

SEQ ID NO: 1671 - protein, 382 aa, Homo sapiens
GPERGRYYPKSHKNVDLNDVLVPKPFSQFWQPLLRGLHSQNFTQALLERMLSELPALGISGIRPTYILRWTVELIVANTKTGRNARRFSAGQWEARRGWRLFNCSASLDWPRMVESCLGSPCWASPQLLRIIFKAMGQGLPDEEQEKLLRICSIYTQSGENSLVQEGSEASPIGKSPYTLDSLYWSVKPASSSFGSEAKAQQQEEQGSVNDVKEEEKEEKEVLPDQVEEEEENDDQEEEEEDEDDEDDEEEDRMEVGPFSTGQESPTAENARLLAQKRGALQGSAWQVSSEDVRWDTFPLGRMPGQTEDPAELMLENYDTMYLLDQPVLEQRLEPSTCKTDTLGLSCGVGSGNCSNSSSSNFEGLLWSQGQLHGLKTGLQLF

SEQ ID NO: 1672 - protein, 110 aa, Homo sapiens; identical to SEQ ID NO: 1670

SEQ ID NO: 1673 - protein, 156 aa, Homo sapiens
  SITE (92): Xaa equals any of the naturally occurring L-amino acids
  SITE (114): Xaa equals any of the naturally occurring L-amino acids
  SITE (122): Xaa equals any of the naturally occurring L-amino acids
  SITE (134): Xaa equals any of the naturally occurring L-amino acids
MLQGHSSVFQALLGTFFTWGMTAAGAALVFVFSSGQRRILDGSLGFAAGVMLAASYWSLLAPAVEMATSSGGFGAFAFFPVAVGFTLGAAFXYLADLLMPHLGAAEDPQTALAXNFGSTLMXKKSDPEGPALLXPESELFIRIGRLASFSSSLLQH

SEQ ID NO: 1674 - protein, 167 aa, Homo sapiens
  SITE (140): Xaa equals any of the naturally occurring L-amino acids
MLQGHSSVFQALLGTFFTWGMTAAGAALVFVFSSGQRRILDGSLGFAAGVMLAASYWSLLAPAVEMATSSGGFGAFAFFPVAVGFTLGAAFVYLADLLMPHLGAAEDPQTALALNFGSTLMKKKSDPEGHALLFPERIHXIDKSENGEAYQRKKAAATGLPEGPAVP

SEQ ID NO: 1675 - protein, 204 aa, Homo sapiens
MFQFLSQGFYCGVGLFTRFLKLLGALLLLALALFLGFLQLGWRFLVGLGDRLGWRDKATWLFSWLDSPALQRCLTLLRDSRPWQRLVRIVQWGWLELPWVKQNINRQGNAPVASGRYCQPEEEVARLLTMAGVPEDELNPFHVLGVEATASDVELKKAYRQLAVMVHPDKNHHPRAEEAFKVFASSLGTLSAMLKKRKGVWRLK

SEQ ID NO: 1676 - protein, 412 aa, Homo sapiens
MGVWTGRLGGWAQVMFQFLSQGFYCGVGLFTRFLKLLGALLLLALALFLGFLQLGWRFLVGLGDRLGWRDKATWLFSWLDSPALQRCLTLLRDSRPWQRLVRIVQWGWLELPWVKQNINRQGNAPVASGRYCQPEEEVARLLTMAGVPEDELNPFHVLGVEATASDVELKKAYRQLAVMVHPDKNHHPRAEEAFKVLRAAWDIVSNAEKRKEYEMKRMAENELSRSVNEFLSKLQDDLKEAMNTMMCSRCQGKHRRFEMDREPKSARYCAECNRLHPAEEGDFWAESSMLGLKITYFALMDGKVYDITQWAGCQRVGISPDTHRVPYHISFGSRIPGTRGRQRATPDAPPADLQDFLSRIFQVPPGQMPNGNFFAAPQPAPGAAAASKPNSTVPKGEAKPKRRKKVRRPFQR

SEQ ID NO: 1677 - protein, 122 aa, Homo sapiens
  SITE (119): Xaa equals any of the naturally occurring L-amino acids
MALFRCVWSVLSALGKSGSDLCAGCGSRLRSPFSFAYVPRCFSSTANSYPKKPLTSYVRFSKEQLPIFKAQNPDAKNSELIRKIAQLWRELPDSEKKIYEDAYRADLAGHTKKEINRIXEPG

SEQ ID NO: 1678 - protein, 246 aa, Homo sapiens
MALFRCVWSVLSALGKSGSDLCAGCGSRLRSPFSFAYVPRCFSSTANSYPKKPLTSYVRFSKEQLPIFKAQNPDAKNSELIRKIAQLWRELPDSEKKIYEDAYRADWQAYKEEINRIQEQLTPSQIVSLEKEIQQKRLKKKALIKKRELTMLGKPKRPRSAYNIFIAERFQETKDGTSQVKLKTINENWKNLSSSQKQVYIQLANDDKIRYYNEMKSWEEQMMEVGRKDLLRRTVKHQRKVDPEEY

SEQ ID NO: 1679 - protein, 495 aa, Homo sapiens
  SITE (330): Xaa equals any of the naturally occurring L-amino acids
  SITE (333): Xaa equals any of the naturally occurring L-amino acids
MSMLVVFLLLWGVTWGPVTEAAIFYETQPSLWAESESLLKPLANVTLTCQARLETPDFQLFKNGVAQEPVHLDSPAIKHQFLLTGDTQGRYRCRSGLSTGWTQLSKLLELTGPKSLPAPWLSMAPVSWITPGLKTTAVCRGVLRGVTFLLRREGDHEFLEVPEAQEDVEATFPVHQPGNYSCSYRTDGEGALSEPSATVTIEELAAPPPPVLMHHGESSQVLHPGNKVTLTCVAPLSGVDFQLRRGEKELLVPRSSTSPDRIFFHLNAVALGDGGHYTCRYRLHDNQNGWSGDSAPVELILSDETLPAPEFSPEPESGRALRLRCLAPLXGAXFALVREDRGGRRVHRFQSPAGTEALFELHNISVADSANYSCVYVDLKPPFGGSAPSERLELHVDGPPPRPQLRATWSGAVLAGRDAVLRCEGPIPDVTFELLREGETKAVKTVRTPGAAANLELIFVGPQHAGNYRCRYRSWVPHTFESELSDPVELLVAES

SEQ ID NO: 1680 - protein, 495 aa, Homo sapiens
MSMLVVFLLLWGVTWGPVTEAAIFYETQPSLWAESESLLKPLANVTLTCQARLETPDFQLFKNGVAQEPVHLDSPAIKHQFLLTGDTQGRYRCRSGLSTGWTQLSKLLELTGPKSLPAPWLSMAPVSWITPGLKTTAVCRGVLRGVTFLLRREGDHEFLEVPEGQEDVEATFPVHQPGNYSCSYRTDGEGALSEPSATVTIEELAAPPPPVLMHHGESSQVLHPGNKVTLTCVAPLSGVDFQLRRGEKELLVPRSSTSPDRIFFHLNAVALGDGGHYTCRYRLHDNQNGWSGDSAPVELILSDETLPAPEFSPEPESGRALRLRCLAPLEGARFALVREDRGGRRVHRFQSPAGTEALFELHNISVADSANYSCVYVDLKPPFGGSAPSERLELHVDGPPPRPQLRATWSGAVLAGRDAVLRCEGPIPDVTFELLREGETKAVKTVRTPGAAANLELIFVGPQHAGNYRCRYRSWVPHTFESELSDPVELLVAES

SEQ ID NO: 1681 - protein, 153 aa, Homo sapiens
MLKDFSNLLLVVLCDYVLGEAEYLLLREPGHVALSNDTVYVDFQYFDGANGTLRNVSVLLLEANTNQTVTTKYLLTNQSQGTLKFECFYFKEAGDYWFTMTPEATDNSTPFPWWEKSAFLKVEWPVFHVDLNRSAKAAEGTFQVGLFTSQPLC

SEQ ID NO: 1682 - protein, 78 aa, Homo sapiens
SSPTSPKDNYQRVSSLSPSQCRKDKCQSFPTHPEFAFYDNTSFGLTEAEQRMLDLPGYFGSNEEDETTSTLSVEKLVI

SEQ ID NO: 1683 - protein, 490 aa, Homo sapiens
MGKNKYCFDFGISSRSHFSAKEECMLIQRNTAFQPSSPSPLQPQGPVKSNNIVTVTGISLCLFIIIATVLITLWRRFGRPAKCSTPARHNSIHSPSFRKNSDEENICELSEQRGSFSDGGDGPTGSPGDTGIPLTYRRSGPVPPEDDASGSESFQSNAQKIIPPLFSYRLAQQQLKEMKKKGLTETTKVYHVSQSPLTDTAIDAAPSAPLDLESPEEAAANKFRIKSPFPEQPAVSAGERPPSRLDLNVTQASCAISPSQTLIRKSQARHVGSRGGPSERSHARNAHFRRTASFHEARQARPFRERSMSTLTPRQAPAYSSRTRTCEQAEDRFRPQSRGAHLFPEKLEHFQEASGTRGPLNPLPKSYTLGQPLRKPDLGDHQAGLVAGIERTEPHRARRGPSPSHKSVSRKQSSPISPKDNYQRVSSLSPSQCRKDKCQSFPTHPEFAFYDNTSFGLTEAEQRMLDLPGYFGSNEEDETTSTLSVEKLVI

SEQ ID NO: 1684 - protein, 178 aa, Homo sapiens
  SITE (123): Xaa equals any of the naturally occurring L-amino acids
  SITE (175): Xaa equals any of the naturally occurring L-amino acids
MAMVPGATLRRLLSVVLPTASQPQLLALLDSATERHVDHAAESDGGAEQADVGRRRKHQSWWQALDGKLRGDLISRGLEKMLWARKRKQSILKKTCLPLRERMIFSGKGSWPHLSLEPIGELXPVPIVGAETIDLLNTGEKLFIFRNPKEPEISLHVPPRKKKNFLNAKKAMRAXGMD

SEQ ID NO: 1685 - protein, 200 aa, Homo sapiens [sequence omitted]

SEQ ID NO: 1686 - protein, 419 aa, Homo sapiens
MSCAGRAGPARLAALALLTCSLWPARADNASQEYYTALINVTVQEPGRGAPLTFRIDRGRYGLDSPKAEVRGQVLAPLPLHGVADHLGCDPQTRFFVPPNIKQWIALLQRGNCTFKEKISRAAFHNAVAVVIYNNKSKEEPVTMTHPGTGDIIAVMITELRGKDILSYLEKNISVQMTIAVGTRMPPKNFSRGSLVFVSISFIVLMIISSAWLIFYFIQKIRYTNARDRNQRRLGDAAKKAISKLTTRTVKKGDKETDPDFDHCAVCIESYKQNDVVRILPCKHVFHKSCVDPWLSEHCTCPMCKLNILKALGIVPNLPCTDNVAFDMERLTRTQAVNRRSALGDLAGDNSLGLEPLRTSGISPLPQDGELTPRTGEINIAVTKEWFIIASFGLLSALTLCYMIIRATASLNANEVEWF

SEQ ID NO: 1687 - protein, 419 aa, Homo sapiens; identical to SEQ ID NO: 1686

SEQ ID NO: 1688 - protein, 143 aa, Homo sapiens
  SITE (120): Xaa equals any of the naturally occurring L-amino acids
  SITE (142): Xaa equals any of the naturally occurring L-amino acids
MAFSKLLEQAGGVGLFQTLQVLTFILPCLMIPSQMLLENFSAAIPGHRCWTHMLDNGSAVSTNMTPKALLTISIPPGPNQGPHQCRRFRQPQWQLLDPNATATSWSEADTEPCVDGWVYXRRSSPPPSWPSGTWCAAPRLEXP

SEQ ID NO: 1689 - protein, 515 aa, Homo sapiens
  SITE (145): Xaa equals any of the naturally occurring L-amino acids
  SITE (151): Xaa equals any of the naturally occurring L-amino acids
  SITE (168): Xaa equals any of the naturally occurring L-amino acids
MAFSKLLEQAGGVGLFQTLQVLTFILPCLMIPSQMLLENFSAAIPGHRCWTHMLDNGSAVSTNMTPKALLTISIPPGPNQGPHQCRRFRQPQWQLLDPNATATSWSEADTEPCVDGWVYDRSVFTSTIVAKWDLVCSSQGLKPLXQSIFMXGILVGSFIWGLLSYRFXRKPMLSWCCLQLAVAGTSTIFAPTFVIYCGLRFVAAFGMAGIFLSSLTLMVEWTTTSRRAVTMTVVGCAFSAGQAALGGLAFALRDWRTLQLAASVPFFAISLISWWLPESARWLIIKGKPDQALQELRKVARINGHKEAKNLTIEVLMSSVKEEVASAKEPRSVLDLFCVPVLRWRSCAMLVVNFSLLISYYGLVFDLQSLGRDIFLLQALFGAVDFLGRATTALLLSFLGRRTIQAGSQAMGGLAILANMLVPQVRMTADGILHTVGRLGAMMGPLILMSRQALPLLPPLLYGVISIASSLVVLFFLPETQGLPLPDTIQDLESQKSTAAQGNRQEAVTVESTSL

SEQ ID NO: 1690 - protein, 88 aa, Homo sapiens
MDWWFLAIAMALLWLTTSRKQCCSTWALLNYMALMILIGENPDLLVNLDSLQEPVCVILVKGLLFQRIAANLQPLVLHHHTIQMMNKK

SEQ ID NO: 1691 - protein, 81 aa, Homo sapiens
MDWWFLAIAMALLWLTTSRKQCCSTWALLNYMALMILIGENPDLLVNLDSLQEPVCVILVKGLLFQRIAANLQPLQRCQGS

SEQ ID NO: 1692 - protein, 462 aa, Homo sapiens
  SITE (148): Xaa equals any of the naturally occurring L-amino acids
  SITE (149): Xaa equals any of the naturally occurring L-amino acids
  SITE (204): Xaa equals any of the naturally occurring L-amino acids
  SITE (292): Xaa equals any of the naturally occurring L-amino acids
  SITE (303): Xaa equals any of the naturally occurring L-amino acids
MVDYLQKAVLLNLGTIELYGSNDPYRREPRSPRKSRQPSGAGLCDISEGTVVPEDRCKSPTSAKMSRKLSLPTDLKPDLDVKDNSFSRSRSSSVTSIDKESREAISALHFCETFTRKTDSSPSPCLWVGTTLGTVLVIALNLPPGGEXXLLQPVIVSPSGTILRLKGAILRMAFLDTTGCLIPPAYEPWREHNVPEEKDEKEKXKKRRPVSVSPSSSQEISENQYAVICSEKQAKVISLPTQNCAYKQNITETSFVLRGDIVALSNSICLACFCANGHIMTFSLPSLRPLLXVYYLPLTNMRXARTFCFTNNGQALYLVSPTEIQRLTYSQETCENLQEMLGELFTPVETPEAPNRGFFKGLFGGGAQSLDREELFGESSSGKASRSLAQHIPGPGGIEGVKGAASGVVGELARARLALDERGQKLGDLEERTAAMLSSAESFSKHAHEIMLKYKDKKWYQF

SEQ ID NO: 1693 - protein, 112 aa, Homo sapiens
MLISGWARWLMPLVPALWEAEAGESGVQDQPGQCGETLSLLKIKKKKKKKWLISESYSGLNSVIQPKLITLCYLWEPHLKSKDPDTCLILWQGSNESNKMLVKVRTGSILNT

SEQ ID NO: 1694 - protein, 82 aa, Homo sapiens
  SITE (45): Xaa equals any of the naturally occurring L-amino acids
  SITE (76): Xaa equals any of the naturally occurring L-amino acids
MGLQSRLSQPCHCRHLGLGNSVVGTVLFLVGCLVASLPPPTRCQXHCSPQPPAPVVTIVSKHCQMVQGKGKIAPVXKSTAVK

SEQ ID NO: 1695 - protein, 82 aa, Homo sapiens; identical to SEQ ID NO: 1510

SEQ ID NO: 1696 - protein, 193 aa, Homo sapiens
MQLGTLLTFFHELVQTALPSGSCVDTLLKDLCKMYTTLTALVRYYLQVCQSSGGIPKNMEKLVKLSGSHLTPLCYSFISYVQNKSKSLNYTGEKKEKPAAVATAMARVLRETKPIPNLIFAIEQYEKFLIHLSKKSKVNLMQHMKLSTSRDFKIKGNILDMVLREDGEDENEEGTASEHGGQNKEPAKKKRKK

SEQ ID NO: 1697 - protein, 193 aa, Homo sapiens; identical to SEQ ID NO: 1696

SEQ ID NO: 1698 - protein, 22 aa, Homo sapiens
MVCDSLPRHDFHPARLHPTRFL

SEQ ID NO: 1699 - protein, 271 aa, Homo sapiens
MLSEKHLISVCADNNHVRTWSVTRFRGMISTQPGSTPLASFKILALESADGHGGCSAGNDIGPYGERDDQQVFIQKVVPSASQLFVRLSSTGQRVCSVRSVDGSPTTAFTVLECEGSRRLGSRPRRYLLTGQANGSLAMWDLTTAMDGLGQAPAGGLTEQELMEQLEHCELAPPAPSAPSWGCLPSPSPRISLTSLHSASSNTSLSGHRGSPSPPQAEARRRGGGSFVERCQELVRSGPDLRRPPTPAPWPSSGLGTPLTPPKMKLNETSF

SEQ ID NO: 1700 - protein, 148 aa, Homo sapiens
  SITE (71): Xaa equals any of the naturally occurring L-amino acids
  SITE (125): Xaa equals any of the naturally occurring L-amino acids
MRSSCVLLTALVALAAYYVYIPLPGSVSDPWKLMLLDATFRGAQQVSNLIHYLGLSHHLLALNFIIVSFGXKSAWSSAQVKVTDTDFDGVEVRVFEGPPKPEEPLKRSVVYIHGGGWALASAKIXYYDELCTAMAEELNAALFPLNTG

SEQ ID NO: 1701 - protein, 148 aa, Homo sapiens; identical to SEQ ID NO: 1700
  SITE (71): Xaa equals any of the naturally occurring L-amino acids
  SITE (125): Xaa equals any of the naturally occurring L-amino acids

SEQ ID NO: 1702 - protein, 408 aa, Homo sapiens
  SITE (223): Xaa equals any of the naturally occurring L-amino acids
MRSSCVLLTALVALAAYYVYIPLPGSVSDPWKLMLLDATFRGAQQVSNLIHYLGLSHHLLALNFIIVSFGQKSAWSSAQVKVTDTDFDGVEVRVFEGPPKPEEPLKRSVVYIHGGGWALASAKISYYDELCTAMAEELNAVIVSIEYRLVPKVYFPEQIHDVVRATKYFLKPEVLQKYMVDPGRICISGDSAGGNLAAALGQQFTQDASLKNKLKLQALIYPXLQALDFNTPSYQQNVNTPILPRYVMVKYWVDYFKGNYDFVQAMIVNNHTSLDVEEAAAVRARLNWTSLLPASFTKNYKPVVQTTGNARIVQELPQLLDARSAPLIADQAVLQLLPKTYILTCEHDVLRDDGIMYAKRLESAGVEVTLDHFEDGFHGCMIFTSWPTNFSVGIRTRNSYIKWLDQNL

SEQ ID NO: 1703 - protein, 88 aa, Homo sapiens
MMFCFVLFLRWSLALLPGWLAVARSRLTAISCFLGLSDSPALASRVAGTTGAHHHARLVFCILVETVSPCWPGWSRSPDFVICLPQTP

SEQ ID NO: 1704 - protein, 88 aa, Homo sapiens; identical to SEQ ID NO: 1703

SEQ ID NO: 1705 - protein, 94 aa, Homo sapiens
MIGYRLCLHLLSLLGFQPLPMGLCRVREQKFKQFSGLSHFSFRISPVTFPSYVHADSQPTRDKWVPWDLSSFTCMCAEASKSARNVWTALQTPL

SEQ ID NO: 1706 - protein, 61 aa, Homo sapiens
SQHFGRPRWKDCLKPGVRDQPGQHSKTPSLCKKKGIILYFLLIRFICVSNLHLQFDFFSDL

SEQ ID NO: 1707 - protein, 101 aa, Homo sapiens
  SITE (69): Xaa equals any of the naturally occurring L-amino acids
VIFFFFFSCRERVCVAQAGLNFMASSYSASASRSAGNIGMSHHTQPLCLLSFSIIINLFMFIHSPVDEXLGCFQFWAVTNKAPGNICVQKKKKKKKKKKKK

SEQ ID NO: 1708 - protein, 123 aa, Homo sapiens
MAWPNVFQRGSLLSQFSHHHVVVFLLTFFSYSLLHASRKTFSNVKVSISEQWTPSAFNTSVELPLEIWSSNHLFPSAEKATLFLGTLDTIFLFSYAVGLFISGIVGDRLNLRWVLLLACALLH

SEQ ID NO: 1709 - protein, 160 aa, Homo sapiens
  SITE (7): Xaa equals any of the naturally occurring L-amino acids
LPNCYLXDTIEGTPAGTGPEFAAASTSLKECRAVIIASRGQPVWPALLDVHAVDDFVVSCNLAHRRATIPEEDCSKLLPSFPDHGDPLTVFSPSNVFDLPSERLVLILQQVLLLRGIPDPQLPRHISGGNVESAGRILGHHHLMGVLCVDVSKGWVVDVP

SEQ ID NO: 1710 - protein, 21 aa, Homo sapiens
HHHLMGVLCVDVSKGWVVDVP

SEQ ID NO: 1711 - protein, 185 aa, Homo sapiens
  SITE (163): Xaa equals any of the naturally occurring L-amino acids
MAWPNVFQRGSLLSQFSHHHVVVFLLTFFSYSLLHASRKTFSNVKVSISEQWTPSAFNTSVELPLEIWSSNHLFPSAEKATLFLGTLDTIFLFSYAVGLFISGIVGDRLNLRWVLSFGMCSSALVVFVFGALTEWLRFYNKWLYCCLWIVNGLLQSTGWPCVXAVMGNWFGKAGYATSFLSNFSV

SEQ ID NO: 1712 - protein, 102 aa, Homo sapiens
  SITE (13): Xaa equals any of the naturally occurring L-amino acids
  SITE (14): Xaa equals any of the naturally occurring L-amino acids
MRVSCSRSCCSLXXISLSLRLVASCLPCCLCLSAAPRMQEEPGHLRPSRARPLEGPSWDSPSLAPPASAQRPLPPPVSRILPATSGRAGRWCGWAPCPKTAA

SEQ ID NO: 1713 - protein, 53 aa, Homo sapiens
  SITE (31): Xaa equals any of the naturally occurring L-amino acids
VWARWPMLSIPAAQGGRLLEPKHSRLAWETXQDPVSTKTFKMSQVAGCGGSCL

SEQ ID NO: 1714 - protein, 173 aa, Homo sapiens [sequence omitted]

SEQ ID NO: 1715 - protein, 102 aa, Homo sapiens
MRVSCSRSCCSLPPISLSLRLVASCLPCCLCLSAAPRMQEEPGHLRPSRARPLEGPSWDSPSLAPPASAQRPLPPPVSRILPATSGRAGRWCGWAPCPKTAA

SEQ ID NO: 1716 - protein, 180 aa, Homo sapiens
  SITE (140): Xaa equals any of the naturally occurring L-amino acids
MPAPARSCQRAALSLWASGLGWLSAQPTVAFRGSSWDWEPPQGQADGVRFVLGLVLPMLGGGGAPRTDQPCFSCNAVTLSLNTWIHVWPGLAGSRSPARVGSHGPALEPPSGPGAAEAASEGLPRPAFHRWGAQPSKAAXTPPRPVCQGAGHNPAGPRTGLQASPCAPAGRPCSREEVLG

SEQ ID NO: 1717 - protein, 131 aa, Homo sapiens
  SITE (24): Xaa equals any of the naturally occurring L-amino acids
  SITE (122): Xaa equals any of the naturally occurring L-amino acids
  SITE (123): Xaa equals any of the naturally occurring L-amino acids
EAKGTAMQRPWGRTAPGMREEQSXERRAGRAGPCGPQGGLGHLPRGSGAPGCVSRWERQGRICGDLTRAGEAETRVQPPPPKAGPSQRRGRAGQEVSGCLLGLVWFCFVLFIVVKYKIYRLXXKKKKKGRP

SEQ ID NO: 1718 - protein, 180 aa, Homo sapiens [sequence omitted]

SEQ ID NO: 1719 - protein, 177 aa, Homo sapiens
  SITE (120): Xaa equals any of the naturally occurring L-amino acids
  SITE (124): Xaa equals any of the naturally occurring L-amino acids
  SITE (126): Xaa equals any of the naturally occurring L-amino acids
  SITE (148): Xaa equals any of the naturally occurring L-amino acids
  SITE (171): Xaa equals any of the naturally occurring L-amino acids
  SITE (172): Xaa equals any of the naturally occurring L-amino acids
MVGKIKRLKKSAFVVLILLITAKLLVLPLLCREMVELLDKGDSVVNHTSLSNYAFLYGVFPVAPGVAIFATQFNMEVEIITSGMVISTFVSAPIMYVSAWLLTFPTMDPKPLAYAIQNVXFDIXIXSLISLIWSLAILLLSKKYKQLXHMLTTNLLIAQSIVCAGMMIWNXXKEKNF

SEQ ID NO: 1720 - protein, 447 aa, Homo sapiens
TTTKFAAASTFHPASKSNIKKVWMAEQKISYDKKKQEELMQQYLKEQESYDNRLLMGDERVKNGLNFMYEAPPGAKKENKEKEETEGETEYKFEWQKGAPREKYAKDDMNIRDQPFGIQVRNVRCIKCHKWGHVNTDRECPLFGLSGINASSVPTDGSGPSMHPSELIAEMRNSGFALKRNVLGRNLTANDPSQEYVASEGEEDPEVEFLKSLTTKQKQKLLRKLDRLEKKKKKKDRKKKKFQKSRSKHKKHKSSSSSSSSSSSSSSTETSESSSESESNNKEKKIQRKKRKKNKCSGHNNSDSEEKDKSKKRKLHEELSSSHHNREKAKEKPRFLKHESSREDSKWSHSDSDKKSRTHKHSPEKRGSERKEGSSRSHGREERSRRSRSRSPGSYKQRETRKRAQRNPGEEQSRRNDSRSHGTDLYRGEKMYREHPGGTHTKVTQRE

SEQ ID NO: 1721 - protein, 177 aa, Homo sapiens
  SITE (98): Xaa equals any of the naturally occurring L-amino acids
  SITE (134): Xaa equals any of the naturally occurring L-amino acids
  SITE (148): Xaa equals any of the naturally occurring L-amino acids
  SITE (171): Xaa equals any of the naturally occurring L-amino acids
  SITE (172): Xaa equals any of the naturally occurring L-amino acids
MVGKIKRLKKSAFVVLILLITAKLLVLPLLCREMVELLDKGDSVVNHTSLSNYAFLYGVFPVAPGVAIFATQFNMEVEIITSGMVISTFVSAPIMYVXAWLLTFPTMDPKPLAYAIQNVSFDISIVSLISLIWXLAILLLSKKYKQLXHMLTTNLLIAQSIVCAGMMIWNXXKEKNF

SEQ ID NO: 1722 - protein, 227 aa, Homo sapiens
  SITE (171): Xaa equals any of the naturally occurring L-amino acids
MVGKIKRLKKSAFVVLILLITAKLLVLPLLCREMVELLDKGDSVVNHTSLSNYAFLYGVFPVAPGVAIFATQFNMEVEIITSGMVISTFVSAPIMYVSAWLLTFPTMDPKPLAYAIQNVSFDISIVSLISLIWSLAILLLSKKYKQLPHMLTTNLLIAQSIVCAGMMIWNXVKEKNFVGQILVFVLLYSSLYSTYLWTGLLAISLFLLKKRERVQIPVGIIIISGWG

SEQ ID NO: 1723 - protein, 227 aa, Homo sapiens
MVGKIKRLKKSAFVVLILLITAKLLVLPLLCREMVELLDKGDSVVNHTSLSNYAFLYGVFPVAPGVAIFATQFNMEVEIITSGMVISTFVSAPIMYVSAWLLTFPTMDPKPLAYAIQNVSFDISIVSLISLIWSLAILLLSKKYKQLPHMLTTNLLIAQSIVCAGMMIWNFVKEKNFVGQILVFVLLYSSLYSTYLWTGLLAISLFLLKKRERVQIPVGIIIISGWG

SEQ ID NO: 1724 - protein, 87 aa, Homo sapiens
  SITE (61): Xaa equals any of the naturally occurring L-amino acids
  SITE (82): Xaa equals any of the naturally occurring L-amino acids
MQWRALVLGLVLLRLGLHGVLWLVFGLGPSMGFYQRFPLSFGFQRLRSPDGPASPTFGARXPAWGGIRAVVACNRRGTGQRXTRAKL

SEQ ID NO: 1725 - protein, 146 aa, Homo sapiens
  SITE (115): Xaa equals any of the naturally occurring L-amino acids
  SITE (123): Xaa equals any of the naturally occurring L-amino acids
  SITE (140): Xaa equals any of the naturally occurring L-amino acids
MQWRALVLGLVLLRLGLHGVLWLVFGLGPSMGFYQRFPLSFGFQRLRSPDGPASPTSGPVGRPGGVSGPSWLQPPGTGAAQSPRKAPRRPGPGMCGPANWGYVLGRPGRGPDEYXEAATAAPXLRNLRARCPELARGMVXFWATTL

SEQ ID NO: 1726 - protein, 405 aa, Homo sapiens
MQWRALVLGLVLLRLGLHGVLWLVFGLGPSMGFYQRFPLSFGFQRLRSPDGPASPTSGPVGRPGGVSGPSWLQPPGTGAAQSPRKAPRRPGPGMCGPANWGYVLGGRGRGPDEYEKRYSGAFPPQLRAQMRDLARGMFVFGYDNYMAHAFPQDELNPIHCRGRGPDRGDPSNLNINDVLGNYSLTLVDALDTLAIMGNSSEFQKAVKLVINTVSFDKDSTVQVFEATIRVLGSLLSAHRIITDSKQPFGDMTIKDYDNELLYMAHDLAVRLLPAFENTKTGIPYPRVNLKTGVPPDTNNETCTAGAGSLLVEFGILSRLLGDSTFEWVARRAVKALWNLRSNDTGLLGVAPFLAIGTAHCLVPFSFHLLWALPPFYSSTQLTTQQELCQLYLISLCDPLQRGCMV

SEQ ID NO: 1727 - protein, 120 aa, Homo sapiens
  SITE (116): Xaa equals any of the naturally occurring L-amino acids
  SITE (120): Xaa equals any of the naturally occurring L-amino acids
MILWLDWALFLLVFPGQFFCWFCLGSLMRLQVAAGSASVWGSAGMTWPLSACGPLSSMMVSGFQASKPQCTSIYPAFACIALAHVSLAKTDHVAKLRVSVGRVYTSAWILKGMIHXGPLX

SEQ ID NO: 1728 - protein, 53 aa, Homo sapiens
  SITE (11): Xaa equals any of the naturally occurring L-amino acids
KYSYCSHLHFXMNESALFCSNFHWKPVGSERLWPPLIIYDLKPACNREPLQSL

SEQ ID NO: 1729 - protein, 120 aa, Homo sapiens
MILWLDWALFLLVFPGQFFCWFCLGSLMRLQVAAGSASVWGSAGMTWPLSACGPLSSMMVSGFQASKPQCTSIYPAFACIALAHVSLAKTDHVAKLRVSVGRVYTSAWILKGMIHWGPLL

SEQ ID NO: 1730 - protein, 485 aa, Homo sapiens [sequence omitted]

SEQ ID NO: 1731 - protein, 485 aa, Homo sapiens [sequence omitted]

SEQ ID NO: 1732 - protein, 485 aa, Homo sapiens [sequence omitted]

SEQ ID NO: 1733 - protein, 65 aa, Homo sapiens [sequence omitted]

SEQ ID NO: 1734 - protein, 65 aa, Homo sapiens [sequence omitted]

SEQ ID NO: 1735 - protein, 342 aa, Homo sapiens
  SITE (150): Xaa equals any of the naturally occurring L-amino acids
  SITE (271): Xaa equals any of the naturally occurring L-amino acids
MWTALVLIWIFSLSLSESHAASNDPRNFVPNKMWKGLVKRNASVETVDNKTSEDVTMAAASPVTLTKGTSAAHLNSMEVTTEDTSRTDVSEPATSGGAADGVTSIAPTAVASSTTAASITTAASSMTVASSAPTTAASSTTVASIAPTTXASSMTAASSTPMTLALPAPTSTSTGRTPSTTATGHPSLSTALAQVPKSSALPRTATLATLATRAQTVATTANTSSPMSTRPSPSKHMPSDTAASPVPPMRPQAQGPISQVSVDQPVVNTTXKSTPMPSNTTTEPLTQAVVDKTLLLVVLLLGVTLFITVLVLFALQAYESYKKKDYTQVDYLINGMYADSEM

SEQ ID NO: 1736 - protein, 96 aa, Homo sapiens
  SITE (75): Xaa equals any of the naturally occurring L-amino acids
MTLPTSQCLICLLQALCGIGHGALAWGSNQVLFPGGQQEDGGCQRIPDPSFLSTPCGKQGGHAEQELQQCWGAFXQLPGCVLHFHPGVLHKAHSEW

SEQ ID NO: 1737 - protein, 79 aa, Homo sapiens [sequence omitted]

SEQ ID NO: 1738 - protein, 96 aa, Homo sapiens
MTLPTSQCLICLLQALCGIGHGALAWGSNQVLFPGGQQEDGGCQRIPDPSFLSTPCGKQGGHAEQELQQCWGAFCQLPGCVLHFHPGVLHKAHSEW

SEQ ID NO: 1739 - protein, 162 aa, Homo sapiens
  SITE (134): Xaa equals any of the naturally occurring L-amino acids
  SITE (142): Xaa equals any of the naturally occurring L-amino acids
  SITE (154): Xaa equals any of the naturally occurring L-amino acids
  SITE (161): Xaa equals any of the naturally occurring L-amino acids
MALPRCTWPNYVWRAVMACLVHRGLGAPLTLCMLGCLLQAGHVLSQKLDDVDPLVATNFGKIRGIKKELNNEILGPVIQFLGVPYAAPPTGERRFQPPEPPSPWSDIRNATQFAPVCPQNIIDGRLPEVMLPVXFTNNLDVXSSYVQDQSERLXIFKYICXD

SEQ ID NO: 1740 - protein, 228 aa, Homo sapiens
MALPRCTWPNYVWRAVMACLVHRGLGAPLTLCMLGCLLQAGHVLSQKLDDVDPLVATNFGKIRGIKKELNNEILGPVIQFLGVPYAAPPTGERRFQPPEPPSPWSDIRNATQFAPVCPQNIIDGRLPEVMLPVWFTNNLDVVSSYVQDQSEDCLYLNIYVPTEDDIRDSGGPKPVMVYIHGGSYMEGTGNLYDGSVLASYGNVIVITVNYRLGVLGKKSLSFVFTMNP

SEQ ID NO: 1741 - protein, 94 aa, Homo sapiens
MLPTLTAPTLALLLLPKISCLLTSTHPRTQGSRAHFPRAWRLDPGEFLHPLQDPHSSPLWSLDHRWRWPELTCWLWGHSSCWPRMRRGTREYKG

SEQ ID NO: 1742 - protein, 94 aa, Homo sapiens; identical to SEQ ID NO: 1741

SEQ ID NO: 1743 - protein, 57 aa, Homo sapiens
  SITE (8): Xaa equals any of the naturally occurring L-amino acids
  SITE (9): Xaa equals any of the naturally occurring L-amino acids
MRTDYPRXXRSCLCVSLSPPLVSKGSHRSRWLRTMAVPAGTQVWRQDLQPLGAVLLQ

SEQ ID NO: 1744 - protein, 123 aa, Homo sapiens
MRTDYPRSVLAPAYVSVCLLLLCPREVIAPAGSEPWLCQPAPRCGDKIYNPLEQCCYNDAIVSLSETRQCGPPCTFWPCFELCCLDSFGLTNDFVVKLKVQGVNSQCHSSPISSKCESRRRFP

SEQ ID NO: 1745 - protein, 107 aa, Homo sapiens [sequence omitted]

SEQ ID NO: 1746 - protein, 107 aa, Homo sapiens [sequence omitted]

SEQ ID NO: 1747 - protein, 120 aa, Homo sapiens [sequence omitted]

SEQ ID NO: 1748 - protein, 62 aa, Homo sapiens
  SITE (23): Xaa equals any of the naturally occurring L-amino acids
DVLQITFWWPLVTAVSLQGLNKXLSPIPFHTCVVYYWQASVLRVSNGTDGCQTLWISASPGW

SEQ ID NO: 1749 - protein, 120 aa, Homo sapiens [sequence omitted]

SEQ ID NO: 1750 - protein, 105 aa, Homo sapiens
MDDFLFSVSILSGILCSILAVLKFMLGKVLTSRALITDGFNSLVGGVMGFSILLSAEVFKHDSAVWYLDGSIGVLIGLTIFAYGVKLLIDMVPRVRQTRHYEMFE

SEQ ID NO: 1751 - protein, 186 aa, Homo sapiens
  SITE (138): Xaa equals any of the naturally occurring L-amino acids
  SITE (166): Xaa equals any of the naturally occurring L-amino acids
MLDKIISIFIIFLLVIGTLLLALLLTAKVHQESVHMIEVTSNLINETLANHPEWANWLPEAQVVQRALNSAANNVYQYGREWITHKLHKILGDKVNNTAVIEKQVLELWDRLYHSWFVKNVTHSGRHKGQKLHVSRQXSWLGDILDWQDIVSFVHENIETFLSILXSLWIVMSLNVSLLLPLALHS

SEQ ID NO: 1752 - protein, 224 aa, Homo sapiens
VLSLIIFLTTLFYLLSSSDEYYKPVKWVISLTPLSQPGPSSNIIGQSVEEAIRGVFDASLKMAGFYGLYTWLTHTMFGINIVFIPSALAAILGAVPFLGTYWAAVPAVLDLWLTQGLGCKAILLLIFHLLPTYFVDTAIYSDISGGGHPYLTGLAVAGGAYYLGLEGAIIGPILLCILVVASNIYSAMLVSPTNSVPTPNQTPWPAQPQRTFRDISEDLKSSVG

SEQ ID NO: 1753 - protein, 424 aa, Homo sapiens
  SITE (138): Xaa equals any of the naturally occurring L-amino acids
  SITE (183): Xaa equals any of the naturally occurring L-amino acids
MLDKIISIFIIFLLVIGTLLLALLLTAKVHQESVHMIEVTSNLINETLANHPEWANWLPEAQVVQRALNSAANNVYQYGREWITHKLHKILGDKVNNTAVIEKQVLELWDRLYHSWFVKNVTHSGRHKGQKLHVSRQXSWLGDILDWQDIVSFVHENIETFLSILESLWIVMSRNVSLLFTTXTTLLTILFYSGTALLNFVLSLIIFLTTLFYLLSSSDEYYKPVKWVISLTPLSQPGPSSNIIGQSVEEAIRGVFDASLKMAGFYGLYTWLTHTMFGINIVFIPSALAAILGAVPFLGTYWAAVPAVLDLWLTQGLGCKAILLLIFHLLPTYFVDTAIYSDISGGGHPYLTGLAVAGGAYYLGLEGAIIGPILLCILVVASNIYSAMLVSPTNSVPTPNQTPWPAQPQRTFRDISEDLKSSVG

SEQ ID NO: 1754 - protein, 385 aa, Homo sapiens
MLDKIISIFIIFLLVIGTLLLALLLTAKVHQESVHMIEVTSNLINETLANHPEWANWLPEAQVVQRALNSAANNVYQYGREWITHKLHKILGDKVNNTAVIEKQVLELWDRLYHSWFVKNVTHSGRHKGQKLHVSRQNSWLGDILDWQDIVSFVHENIETFLSILESLWIVMSRNVSLLFTTVTTLLTILFYSGTALLNFVLSLIIFLTTLFYLLSSSDEYYKPVKWVISLTPLSQPGPSSNIIGQSVEEAIRGVFDASLKMAGFYGLYTWLTHTMFGINIVFIPSALAAILGAVPFLGTYWAAVPAVLDLWLTQGLGCKAILLMIFHLLPTYFVDTAIYSDISGGGHPYLTGLAVAGGSILPRPGRSNHRSYSSLHTCGCFQYL

SEQ ID NO: 1755 - protein, 293 aa, Homo sapiens [sequence omitted]

SEQ ID NO: 1756 - protein, 566 aa, Homo sapiens
MQVVSHGDERPAWLMSETLRHLHTHFGADYDWFFIMQDDTYVQAPRLAALAGHLSINQDLYLGRAEEFIGAGEQARYCHGGFGYLLSRSLLLRLRPHLDGCRGDILSARPDEWLGRCLIDSLGVGCVSQHQAQIRNLTVLTPEGEAGLSWPVGLPAPFTPHSRFEVLGWDYFTEQHTFSCADGAPKCPLQGASRADVGDALETALEQLNRRYQPRLRFQKQRLLNGYRRFDPARGMEYTLDPGSTHASERGHRRALARRVSLLRPLSRVEILPMPYVTEATRVQLVLPLLVAEAAAAPAFLEAFAANVLEPREHALLTLLLVYGPREGGRGAPDPFLGVKAAAAELERRYPGTRLAWLAVRAEAPSQVRLMDVVSKKHPVDTLFFLTTVWTRPGPEVLNRCRMNAISGWQAFFPVHFQEFNPALSPQRSPPGPPGAGPDPPSPPGADPSRGAPIAGRFDRQASAEGCFYNADYLAARARLAGELAGQEEEEALEGLEVMDVFLRFSGLHLFRAVEPGLVQKFSLRDCSPRLSEELYHRCRLSNLEGLGGRAQLAMALFEQEQANST

SEQ ID NO: 1757 - protein, 249 aa, Homo sapiens
  SITE (221): Xaa equals any of the naturally occurring L-amino acids
  SITE (241): Xaa equals any of the naturally occurring L-amino acids
  SITE (246): Xaa equals any of the naturally occurring L-amino acids
MEFSWLETRWARPFYLAFVFCLALGLLQAIKLYLRRQRLLRDLRPFPAPPTHWFLGHQKFIQDDNMEKLEEIIEKYPRAFPFWIGPFQAFFCIYDPDYAKTLLSRTDPKSQYLQKFSPPLLGKGLAALDGPKWFQHRRLLTPGFHFNILKAYIEVMAHSVKMMLDKWEKICSTQDTSVEVYEHINSMSLDIIMKCAFSKETNCQTNSTHDPYAKAILNSAXSYFTVVQLLYHSDIFFKFSXQGYRXPEL

SEQ ID NO: 1758 - protein, 96 aa, Homo sapiens
  SITE (74): Xaa equals any of the naturally occurring L-amino acids
  SITE (88): Xaa equals any of the naturally occurring L-amino acids
  SITE (89): Xaa equals any of the naturally occurring L-amino acids
  SITE (91): Xaa equals any of the naturally occurring L-amino acids
AQGHPWSVRTQLPRIPRPSPMTLGPQILICHSGSAAGSRNCIGQEFAMIELKVTIALILLHFRVTPDPTRPLTXPNHFILKPKNGMYXXLXKLSEC

SEQ ID NO: 1759 - protein, 249 aa, Homo sapiens
  SITE (242): Xaa equals any of the naturally occurring L-amino acids
  SITE (247): Xaa equals any of the naturally occurring L-amino acids
  SITE (248): Xaa equals any of the naturally occurring L-amino acids
MEFSWLETRWARPFYLAFVFCLALGLLQAIKLYLRRQRLLRDLRPFPAPPTHWFLGHQKFIQDDNMEKLEEIIEKYPRAFPFWIGPFQAFFCIYDPDYAKTLLSRTDPKSQYLQKFSPPLLGKGLAALDGPKWFQHRRLLTPGFHFNILKAYIEVMAHSVKMMLDKWEKICSTQDTSVEVYEHINSMSLDIIMKCAFSKETNCQTNSTHDPYAKAIFELSKIIFHRLYSCCITVTYFSNSAXRVTVXXS

SEQ ID NO: 1760 - protein, 509 aa, Homo sapiens
MEFSWLETRWARPFYLAFVFCLALGLLQAIKLYLRRQRLLRDLRPFPAPPTHWFLGHQKFIQDDNMEKLEEIIEKYPRAFPFWIGPFQAFFCIYDPDYAKTLLSRTDPKSQYLQKFSPPLLGKGLAALDGPKWFQHRRLLTPGFHFNILKAYIEVMAHSVKMMLDKWEKICSTQDTSVEVYEHINSMSLDIIMKCAFSKETNCQTNSTHDPYAKAIFELSKIIFHRLYSLLYHSDIIFKLSPQGYRFQKLSRVLNQYTDTIIQERKKSLQAGVKQDNTPKRKYQDFLDIVLSAKDESGSSFSDIDVHSEVSTFLLAGHDTLAASISWILYCLALNPEHQERCREEVRGILGDGSSITWDQLGEMSYTTMCIKETCRLIPAVPSISRDLSKPLTFPDGCTLPAGITVVLSIWGLHHNPAVWKNPKVFDPLRFSQENSDQRHPYAYLPFSAGSRNCIGQEFAMIELKVTIALILLHFRVTPDPTRPLTFPNHFILKPKNGMYLHLKKLSEC

SEQ ID NO: 1761 - protein, 143 aa, Homo sapiens [sequence omitted]

SEQ ID NO: 1762 - protein, 143 aa, Homo sapiens [sequence omitted]

SEQ ID NO: 1763 - protein, 88 aa, Homo sapiens
MKSLIKTYFLLWTLKKLLPLSTLIPIMLSPLDIFFSDNPHIDCSGHHFVPYLLIGLDTDPQFTCLYLLILTLLVFVFSLTLLSPPSPG

SEQ ID NO: 1764 - protein, 88 aa, Homo sapiens; identical to SEQ ID NO: 1763

SEQ ID NO: 1765 - protein, 231 aa, Homo sapiens
  SITE (146): Xaa equals any of the naturally occurring L-amino acids
  SITE (177): Xaa equals any of the naturally occurring L-amino acids
  SITE (193): Xaa equals any of the naturally occurring L-amino acids
  SITE (199): Xaa equals any of the naturally occurring L-amino acids
  SITE (208): Xaa equals any of the naturally occurring L-amino acids
  SITE (222): Xaa equals any of the naturally occurring L-amino acids
  SITE (231): Xaa equals any of the naturally occurring L-amino acids
MALSSLIVILLVVFALVLHGQNKKYKNCSTGKGISTMEESVTLDNGGFAALELSSRHLNVKSTFSKKNGTRSPPRPSPGGLHYSDEDICNKYNGAVLTESVSLKEKSADASESEATDSDYEDALPKHSFVNHYMSDPTYYNSWKRXAQGPRTCAAQVRGGGGLRGGRAAAPGHHHAXRGRRLHPRWPRRANFXYRLLLXRVSKSAALXQGGTEATFRSLFLXRQFNSNKLX

SEQ ID NO: 1766 - protein, 127 aa, Homo sapiens
EGFFKRLFVTSLQEAGLFLFLFFLREGVFHWCNGLAPPGPGRTSDLPSPGFLRLQDQLGRVKRGEGVEGQVRSQSCPGRPPSLSTSSSREPAAHTLLNAGHPRRLLGFEEQTFFPGLSAFCPNFICF

SEQ ID NO: 1767 - protein, 240 aa, Homo sapiens
  SITE (192): Xaa equals any of the naturally occurring L-amino acids
  SITE (222): Xaa equals any of the naturally occurring L-amino acids
  SITE (235): Xaa equals any of the naturally occurring L-amino acids
MALSSLIVILLVVFALVLHGQNKKYKNCSTGKGISTMEESVTLDNGGFAALELSSRHLNVKSTFSKKNGTRSPPRPSPGGLHYSDEDICNKYNGAVLTESVSLKEKSADASESEATDSDYEDALPKHSFVNHYMSDPTYYNSWKRRAQGPRTCAAQVRGGGGLRGGRAAAPGHHHAERGRRLHPRWPRRANXAHRLLLLRVSKAPRLPQGGTEATFRSLFLXRQSTPITELKFLXKKKKI

SEQ ID NO: 1768 - protein, 96 aa, Homo sapiens
MYLPCQMACSLFVLFVIWLLLKIFQAGPQLMSLAHGSATLVLDGMNIFGPSGYGQECRVACNYFRKCRVPSWARCLMPVIPALWEAEAADQLRLGV

SEQ ID NO: 1769 - protein, 57 aa, Homo sapiens
LYQEKPLMWPRTSLLYVVPRWLLPCSSLPCPLPEIKNSLTEKKKKKKKNKKKKKGRP

SEQ ID NO: 1770 - protein, 104 aa, Homo sapiens [sequence omitted]

SEQ ID NO: 1771 - protein, 206 aa, Homo sapiens
  SITE (176): Xaa equals any of the naturally occurring L-amino acids
  SITE (180): Xaa equals any of the naturally occurring L-amino acids
  SITE (188): Xaa equals any of the naturally occurring L-amino acids
  SITE (189): Xaa equals any of the naturally occurring L-amino acids
  SITE (198): Xaa equals any of the naturally occurring L-amino acids
  SITE (200): Xaa equals any of the naturally occurring L-amino acids
  SITE (206): Xaa equals any of the naturally occurring L-amino acids
MANFKGHALPGSFFLIIGLCWSVKYPLKYFSHTRKNSPLHYYQRLEIVEAAIRTLFSVTVSGIVDMLTYLVSHVPLGVDRLVMAVAVFMEGFLFYYHVHNRPPLDQHIHSLLLYALFGGCVSISLEVIFRDHIVLELFRTSLIILQGTWFWQIGFVLFPPFGTPEWDQKDDANLMXITMXFCCTTWLXXTLWPQLFSXYXLFDSDX

SEQ ID NO: 1772 - protein, 275 aa, Homo sapiens
  SITE (59): Xaa equals any of the naturally occurring L-amino acids
MANFKGHALPGSFFLIIGLCWSVKYPLKYFSHTRKNSPLHYYQRLEIVEAAIRTLFSVXGILAEQFVPDGPHLHLYHENHWIKLMNWQHSTMYLFFAVSGIVDMLTYLVSHVPLGVDRLVMAVAVFMEGFLFYYHVHNRPPLDQHIHSLLLYALFGGCVSISLEVIFRDHIVLELFRTSLIILQGTWFWQIGFVLFPPFGTPEWDQKDDANLMFITMCFCWHYLAALSIVAVNYSLVYCLLTRMKRHGRGEIIGIQKLNSDDTYQTALLSGSDEE

SEQ ID NO: 1773 - protein, 237 aa, Homo sapiens
MANFKGHALPGSFFLIIGLCWSVKYPLKYFSHTRKNSPLHYYQRLEIVEAAIRTLFSVTVSGIVDMLTYLVSHVPLGVDRLVMAVAVFMEGFLFYYHVHNRPPLDQHIHSLLLYALFGGCVSISLEVIFRDHIVLELFRTSLIILQGTWFWQIGFVLFPPFGTPEWDQKDDANLMFITMCFCWHYLAALSIVAVNYSLVYCLLTRMKRHGRGEIIGIQKLNSDDTYQTALLSGSDEE

SEQ ID NO: 1774 - protein, 69 aa, Homo sapiens
MHGMHAAGTGTELTLSGCQPLSTLLLLLLYYCPSFVHSINMCKAAALSLPWAAGQHRGGLSGGAGERMA

SEQ ID NO: 1775 - protein, 69 aa, Homo sapiens; identical to SEQ ID NO: 1774

SEQ ID NO: 1776 - protein, 222 aa, Homo sapiens
MTGQIPRLSKVNLFTLLSLWMELFPAEAQRQKSQKNEEGKHGPLGDNEERTRVSTDKRQVKRTGLVVVKNMKIVGLHCSSEDLHAGQIALIKHGSRLKNCDLYFSRKPCSACLKMIVNAGVNRISYWPADPEISLLTEASSSEDAKLDAKAVERLKSNSRAHVCVLLQPLVCYMVQFVEETSYKCDFIQKITKTLPDANTDFYYECKQERIKEYEMLKKKKK

SEQ ID NO: 1777 - protein, 105 aa, Homo sapiens
  SITE (71): Xaa equals any of the naturally occurring L-amino acids
  SITE (104): Xaa equals any of the naturally occurring L-amino acids
ILKVLKVWSFQLFQIAVCDFSHFYLLRNIHKIIPKMKVHFLFSPRLERGGLGCFMRNVFLDLRWSGLPLLXFPAFPPHHTASLGFLPVSQNYTHDHPNIGSMPXL

SEQ ID NO: 1778 - protein, 489 aa, Homo sapiens
MTGQIPRLSKVNLFTLLSLWMELFPAEAQRQKSQKNEEGKHGPLGDNEERTRVSTDKRQVKRTGLVVVKNMKIVGLHCSSEDLHAGQIALIKHGSRLKNCDLYFSRKPCSACLKMIVNAGVNRISYWPADPEISLLTEASSSEDAKLDAKAVERLKSNSRAHVCVLLQPLVCYMVQFVEETSYKCDFIQKITKTLPDANTDFYYECKQERIKEYEMLFLVSNEEMHKQILMTIGLENLCENPYFSNLRQNMKDLILLLATVASSVPNFKHFGFYRSNPEQINEIHNQSLPQEIARHCMVQARLLAYRTEDHKTGVGAVIWAEGKSRSCDGTGAMYFVGCGYNAFPVGSEYADFPHMDDKQKDREIRKFRYIIHAEQNALTFRCQEIKPEERSMIFVTKCPCDECVPLIKGAGIKQIYAGDVDVGKKKADISYMRFGELEGVSKFTWQLNPSGAYGLEQNEPERRENGVLRPVPQKEEQHQDKKLRLGIH

SEQ ID NO: 1779 - protein, 267 aa, Homo sapiens
MTGQIPRLSKVNLFTLLSLWMELFPAEAQRQKSQKNEEGKHGPLGDNEERTRVSTDKRQVKRTGLVVVKNMKIVGLHCSSEDLHAGQIALIKHGSRLKNCDLYFSRKPCSACLKMIVNAGVNRISYWPADPEISLLTEASSSEDAKLDAKAVERLKSNSRAHVCVLLQPLVCYMVQFVEETSYKCDFIQKITKTLPDANTDFYYECKQERIKEYEMLFLVSNEEMHKQILMTIGLENLCENPYFSNLRQNMKDLILLLATVASMCRL

SEQ ID NO: 1780 - protein, 196 aa, Homo sapiens
  SITE (157): Xaa equals any of the naturally occurring L-amino acids
  SITE (169): Xaa equals any of the naturally occurring L-amino acids
  SITE (171): Xaa equals any of the naturally occurring L-amino acids
  SITE (172): Xaa equals any of the naturally occurring L-amino acids
  SITE (174): Xaa equals any of the naturally occurring L-amino acids
  SITE (179): Xaa equals any of the naturally occurring L-amino acids
  SITE (191): Xaa equals any of the naturally occurring L-amino acids
MYLLEQIDMHGFGGTAATSPLTAVFSLSRSLLAAALLYGFCLGAIKTPWPEQHVPVLFSVFCGLLVALSYHLSRQSSDPTVLWSLIRSKLFPELEERSLETARAEPPDPLPDKMRQSVREVLHSDLVMCVVIAVLTFAISASTVFIALKSVLGFVLXALAGGRGLLHTXPXXTXPQNSXPGSACHSRAETXGIQPG

SEQ ID NO: 1781 - protein, 62 aa, Homo sapiens
  SITE (22): Xaa equals any of the naturally occurring L-amino acids
  SITE (52): Xaa equals any of the naturally occurring L-amino acids
HIISAHVSFTRKLILYSNTWQXAGSRALRVTLADQSPIPPFWVVGSLFCPRXAEASESLSVP

SEQ ID NO: 1782 - protein, 577 aa, Homo sapiens
MYLLEQIDMHGFGGTAATSPLTAVFSLSRSLLAAALLYGFCLGAIKTPWPEQHVPVLFSVFCGLLVALSYHLSRQSSDPTVLWSLIRSKLFPELEERSLETARAEPPDPLPDKMRQSVREVLHSDLVMCVVIAVLTFAISASTVFIALKSVLGFVLYALAGAVGFFTHYLLPQLRKQLPWFCLSQPVLKPLEYSQYEVRGAAQVMWFEKLYAGLQCVEKYLIYPAVVLNALTVDAHTVVSHPDKYCFYCRALLMTVAGLKLLRSAFCCPPQQYLTLAFTVLLFHFDYPRLSQGFLLDYFLMSLLCSKLWDLLYKLRFVLTYIAPWQITWGSAFHAFAQPFAVPHSAMLFVQALLSGLFSTPLNPLLGSAVFIMSYARPLKFWERDYNTKRVDHSNTRLVTQLDRNPGADDNNLNSIFYEHLTRSLQHTLCGDLVLGRWGNYGPGDCFVLASDYLNALVHLIEVGNGLVTFQLRGLEFRGTYCQQREVEAITEGVEEDEGCCCCEPGHLPRVLSFNAAFGQRWLAWEVTASKYVLEGYSISDNNAASMLQVFDLRKILITYYVKVRWAGVAGQQGPCG

SEQ ID NO: 1783 - protein, 177 aa, Homo sapiens
  SITE (145): Xaa equals any of the naturally occurring L-amino acids
  SITE (175): Xaa equals any of the naturally occurring L-amino acids
MKLLLLHPAFQSCLLLTLLGLWRTTPEAHASSPGAPAISAASFLQDLIHRYGEGDSLTLQQLKALLNHLDVGVGRGNVTQHVQGHRNLSTCFSSGDLFTAHNFSEQSRIGSSELQEFCPTILQQLDSRACTSENQENEENEQTEXGRPSAVEVWGYGLLCVTVSPSAPSWGPAWXPS

SEQ ID NO: 1784 - protein, 492 aa, Homo sapiens
MKLLLLHPAFQSCLLLTLLGLWRTTPEAHASSPGAPAISAASFLQDLIHRYGEGDSLTLQQLKALLNHLDVGVGRGNVTQHVQGHRNLSTCFSSGDLFTAHNFSEQSRIGSSELQEFCPTILQQLDSRACTSENQENEENEQTEEGRPSAVEVWGYGLLCVTVISLCSLLGASVVPFMKKTFYKRLLLYFIALAIGTLYSNALFQLIPEAFGFNPLEDYYVSKSAVVFGGFYLFFFTEKILKILLKQKNEHHHGHSHYASESLPSKKDQEEGVMEKLQNGDLDHMIPQHCSSELDGKAPMVDEKVIVGSLSVQDLQASQSACYWLKGVRYSDIGTLAWMITLSDGLHNFIDGLAIGASFTVSVFQGISTSVAILCEEFPHELGDFVILLNAGMSIQQALFFNFLSACCCYLGLAFGILAGSHFSANWIFALAGGMFLYISLADMFPEMNEVCQEDERKGSILIPFIIQNLGLLTGFTIMVVLTMYSGQIQIG

SEQ ID NO: 1785 - protein, 192 aa, Homo sapiens [sequence omitted]

SEQ ID NO: 1786 - protein, 192 aa, Homo sapiens [sequence omitted]

SEQ ID NO: 1787 - protein, 167 aa, Homo sapiens
  SITE (25): Xaa equals any of the naturally occurring L-amino acids
  SITE (150): Xaa equals any of the naturally occurring L-amino acids
MIGPHGYISASDWPLMIFYMVMCIXYILYGILWLTWSACYWKDILRIQFWIAAVIFLGMLEKAVFYSEYQNISNTGLSTQGLLIFAELISAIKRTLARLLVIIVSLGYGIVKPRLGTVMHRVIGLGLLYLIFAAVEGVMRVIGGSNHLAXGLDDIILAVIDSIFVWV

SEQ ID NO: 1788 - protein, 167 aa, Homo sapiens
MIGPHGYISASDWPLMIFYMVMCIVYILYGILWLTWSACYWKDILRIQFWIAAVIFLGMLEKAVFYSEYQNISNTGLSTQGLLIFAELISAIKRTLARLLVIIVSLGYGIVKPRLGTVMHRVIGLGLLYLIFAAVEGVMRVIGGSNHLAVVLDDIILAVIDSIFVWF

SEQ ID NO: 1789 - protein, 81 aa, Homo sapiens
MVHYSWCALFCHFAQGTCLQNSFQSGLVKGCQGSTGGNQGSFQAAKMSPVCYSGHTGWLSRPWAKSISQSADDRSPPSRRT

SEQ ID NO: 1790 - protein, 81 aa, Homo sapiens; identical to SEQ ID NO: 1789

SEQ ID NO: 1791 - protein, 183 aa, Homo sapiens
  SITE (75): Xaa equals any of the naturally occurring L-amino acids
  SITE (125): Xaa equals any of the naturally occurring L-amino acids
MALARPGTPDPQALASVLLLLLWAPALSLLAGTVPSEPPSACASDPCAPGTECQATESGGYTCGPMEPRGCATQXCHHGALCVPQGPDPNGFRCYCVPGFQGPRCELDIDECASRPCHHGATLPXPGRSLRVPLPLGYAAPHLNPLSYVWGIPHLMRQRLPPDGDSKANDSKKLGPQKIYSGK

SEQ ID NO: 1792 - protein, 103 aa, Homo sapiens
MCFLLFGSLCIYYFSLFLVFFFFLFLFCLVFCSCLHCFRYFFTPLDSPRAGSRWSSYAQLLPPPPPPLVEHSCDADTANLQYPHPRRRYLSRPLNPLPENEGI

SEQ ID NO: 1793 - protein, 103 aa, Homo sapiens; identical to SEQ ID NO: 1792

SEQ ID NO: 1794 - protein, 84 aa, Homo sapiens
  SITE (77): Xaa equals any of the naturally occurring L-amino acids
MGHGRRLGRHLLALPVTLSERCLGSPVENETHSRDGTELPDGSREPSSPRRVSESRVTPARTEEPPAEPSLTPDLRXDNSRGSL

SEQ ID NO: 1795 - protein, 84 aa, Homo sapiens
MGHGRRLGRHLLALPVTLSERCLGSPVENETHSRDGTELPDGSREPSSPRRVSESRVTPARTEEPPAEPSLTPDLRLDNSRGSL

SEQ ID NO: 1796 - protein, 116 aa, Homo sapiens
MGSGCPAQPTLSPWGILSRLLGVLAGTSCGVSTPAAAQGGPEIGCRAPHLHLSGHAPLACPCSFLPTSLGGVCVSAPAPALLSWGTLPAIWYWGCPHCLVLGPGPAHSGLALLVCS

SEQ ID NO: 1797 - protein, 171 aa, Homo sapiens
GPWPLCKAQRCAPDQPSGLPWARLGVRVAHWGGGGLARHSTLAGGPSQREPCRLRWSWPLAGCPGSAPPLQGPSRNLLLNGKSYPTKVRLIRGGSLPPVKRRRMNWIDAPDDVFYMATEETRKIRKLLSSSETKRAARRPYKPIALRQSQALPPRPPPPAPVNDEPIVIED

SEQ ID NO: 1798 - protein, 81 aa, Homo sapiens
MLYPRIFTNRGELLPFLFLTVWLWLYKLLFGESPRYPNVIGKTYFFFWTDQISRESRFLERLAFIVSENCLIFLIHAITGQ

SEQ ID NO: 1799 - protein, 81 aa, Homo sapiens; identical to SEQ ID NO: 1798

SEQ ID NO: 1800 - protein, 149 aa, Homo sapiens
  SITE (140): Xaa equals any of the naturally occurring L-amino acids
MVLLWASVLFPAPEDWAELQGAVYRLLVVLLCCLATRKLPHFLHPQRNLLQGSGLDLGAIYQRVEGFASQPEAALRIHATHLGRSPPPRIGSGLKALLQLPASDPTYWATAYFDVLLDKFQVFNIQDKDRISAMQSIFQXTRTLGGEES

SEQ ID NO: 1801 - protein, 149 aa, Homo sapiens [sequence omitted]

SEQ ID NO: 1802 - protein, 140 aa, Homo sapiens
IPLCSIFGALIAVCLIMGLFDGCFISIMAPIAFELVGAQDVSQAIGFLLGFMSIPMTVGPPIAGLLRDKLGSYDVAFYLAGVPPLIGGAVLCFIPWIHSKKQREISKTTGKEKMEKMLENQNSLLSSSSGMFKKESDSII

SEQ ID NO: 1803 - protein, 234 aa, Homo sapiens
PTRPPTRPVRVSVGGLVGEVACACRDCIPETMAEGDNRSTNLLAAETASLEEQLQGWGEVMLMADKVLRWERAWFPPAIMGVVSLVFLIIYYLDPSVLSGVSCFVMFLCLADYLVPILAPRIFGSNKWTTEQQQRFHEICSNLVKTRRRAVGWWKRLFTLKEEKPKMYFMTMIVSLAAVAWVGQQVHNLLLTYLIVTSLLLLPGLNQHGIILKYIGMAKREINKLLKQKEKKNE

SEQ ID NO: 1804 - protein, 155 aa, Homo sapiens [sequence omitted]

SEQ ID NO: 1805 - protein, 202 aa, Homo sapiens
MAEGDNRSTNLLAAETASLEEQLQGWGEVMLMADKVLRWERAWFPPAIMGVVSLVFLIIYYLDPSVLSGVSCFVMFLCLADYLVPILAPRIFGSNKWTTEQQQRFHEICSNLVKTRRRAVGWWKRLFTLKEEKPKMYFMTMIVSLAAVAWVGQQVHNLLLTYLIVTSLLLLPGLNQHGIILKYIGMAKREINKLLKQKKKKK

SEQ ID NO: 1806 - protein, 485 aa, Homo sapiens
ARKPRSQIKNEINIDTLARDEFNLQKMMVMVTASGKLFGIESSSGTILWKQYLPNVKPDSSFKLMVQRTTAHFPHPPQCTLLVKDKESGMSSLYVFNPIFGKWSQVAPPVLKRPILQSLLLPVMDQDYAKVLLLIDDEYKVTAFPATRNVLRQLHELAPSIFFYLVDAEQGRLCGYRLRKDLTTELSWELTIPPEVQRIVKVKGKRSSEHVHSQGRVMGDRSVLYKSLNPNLLAVVTESTDAHHERTFIGIFLIDGVTGRIIHSSVQKKAKGPVHIVHSENWVVYQYWNTKARRNEFTVLELYEGTEQYNATAFSSLDRPQLPQVLQQSYIFPSSISAMEATITERGITSRHLLIGLPSGAILSLPKALLDPRRPEIPTEQSREENLIPYSPDVQIHAERFINYNQTVSRMRGIYTAPSGLESTCLVVAYGLDIYQTRVYPSKQFDVLKDDYDYVLISSVLFGLVFATMITKRLAQVKLLNRAWR

SEQ ID NO: 1807 - protein, 360 aa, Homo sapiens
MAAEWASRFWLWATLLIPAAAVYEDQVGKFDWRQQYVGKVKFASLEFSPGSKKLVVATEKNVIAALNSRTGEILWRHVDKGTAEGAVDAMLLHGQDVITVSNGGRIMRSWETNIGGLNWEITLDSGSFQALGLVGLQESVRYIAVLKKTTLALHHLSSGHLKWVEHLPESDSIHYQMVYSYGSGVVWALGVVPFSHVNIVKFNVEDGEIVQQVRVSTPWLQHLSGACGVVDEAVLVCPDPSSRSLQTLALETEWELRQIPLQSLDLEFGSGFQPRVLPTQPNPVDASRAQFFLHLSPSHYALLQYHYGTLSLLKNFPQTALVSFATTGEKTVAAVMACRNEVQKTSSSEDGSMGELFGEV

SEQ ID NO: 1808 - protein, 75 aa, Homo sapiens
MRGIYTAPSGLESTCLVVAYGLDIYQTRVYPSKQFDVLKDDYDYVLISSVLFGLVFATMITKRLAQVKLLNRAWR

SEQ ID NO: 1809 - protein, 136 aa, Homo sapiens
EFGTRKEEERVAMVPRLAFILFVLARDYNVTSLGQDLNWKYEAKDYRKTGELKNIGECGRSYKFLSRNQDWNTRYSHPNRPAKYSGIDEMCKAQESGLSPSKQLNRLSTLTALKVSQPVKLALFSRSPRREIRVGR

SEQ ID NO: 1810 - protein, 81 aa, Homo sapiens
  SITE (56): Xaa equals any of the naturally occurring L-amino acids
GLHFNIRVDHGMLWAPVLYKDVGQELPVVSTAPSHIALLMEPFTPDVLSRLMGRIXVCKDYVIDQLWSVLKEICQWIIPYG

SEQ ID NO: 1811 - protein, 91 aa, Homo sapiens
  SITE (78): Xaa equals any of the naturally occurring L-amino acids
MHLGLVSLILFCQALEVDISLQGPGIVPGRSEVSLSLQGPRGGGCFPIATGAPFIVLLPLGLYLVFHLCCFFGLFCAXLRLREPGWDHLII

SEQ ID NO: 1812 - protein, 230 aa, Homo sapiens
  SITE (63): Xaa equals any of the naturally occurring L-amino acids
  SITE (66): Xaa equals any of the naturally occurring L-amino acids
MGNSLSVFCSWFCRRSWPCHRQPARLVREAFPAGRAHPAAPAPVPARGIVGRFPLLFNRQRHXGPXFPVRWDGAPMRLCLIPRNTGTPQRVLRPVVWSPPSRKKPVLSPHNSIMFGHLSPVRIPCLRGKFNLQLPSLDDQVIPARLPKTEVSAEEPKEATEVKDQVETQGQEDNKRGPCSNGEAASTSRPLETQGNLTSSWYNPRPLEGNVHLKSLTEKNQTDKAQVHAV

SEQ ID NO: 1813 - protein, 232 aa, Homo sapiens
MGNSLSVFCSWFCRRSWPCHRQPARLVREAFPAGRAHPAAPAPVPARGIVGRFPLLFNRQRHLGPSFPVRWDGAPMRLCLIPRNTGTPQRVLRPVVWSPPSRKKPVLSPHNSIMFGHLSPVRIPCLRGKFNLQLPSLDDQVIPARLPKTEVSAEEPKEATEVKDQVETQGQEDNKRGPCSNGEAASTSRPLETQGNLTSSWYNPRPLEGNVHLKSLTEKNQTDKAQVHAVSC

SEQ ID NO: 1814 - protein, 156 aa, Homo sapiens
MQIQVAGLLQFAVPLFSTAEEDLLAIQLLLNSSESSLHQLTAMVDCRGLHKDYLDALAGICYDGLQGLLYLGLFSFLAALAFSTMICAGPRAWKHFTTRNRDYDDIDDDDPFNPQAWRMAAHSPPRGQLHSFCSYSSGLGSQTSLQPPAQTISNAP

SEQ ID NO: 1815 - protein, 213 aa, Homo sapiens
MQIQVAGLLQFAVPLFSTAEEDLLAIQLLLNSSESSLHQLTAMVDCRGLHKDYLDALAGICYDGLQGLLYLGLFSFLAALAFSTMICAGPRAWKHFTTRNRDYDDIDDDDPFNPQAWRMAAHSPPRGQLHSFCSYSSGLGSQTSLQPPAQTISNAPVSEYMNQAMLFGRNPRYENVPLIGRASPPPTYSPSMRATYLSVADEHLRHYGNQFPA

SEQ ID NO: 1816 - protein, 28 aa, Homo sapiens
  SITE (3): Xaa equals any of the naturally occurring L-amino acids
ECXRKPTPRAEFLQPGGSTSSRAAATAV

SEQ ID NO: 1817 - protein, 75 aa, Homo sapiens
MLNPLRQLFKLMASLFLSVFTLGLPFALFQYYAYTQFCLPGSARPIPEPLVQLAVDKGYRIAEGNEPLGASGMFH

SEQ ID NO: 1818 - protein, 280 aa, Homo sapiens
  SITE (94): Xaa equals any of the naturally occurring L-amino acids
  SITE (95): Xaa equals any of the naturally occurring L-amino acids
MHSQCQGFFSSLTMLNPLRQLFKLMASLFLSVFTLGLPFALFQYYAYTQFCLPGSARPIPEPLVQLAVDKGYRIAEGNEPPWCFWDVPLIYSYXXDVYWNVGFLKYYELKQVPNFLLAAPVAILVAWATWTYVTTHPWLCLTLGLQRSKNNKTLEKPDLGFLSPQVFVYVVHAAVLLLFGGLCMHVQVLTRFLGSSTPIMYWFPAHLLQDQEPLLRSLKTVPWKPLAEDSPPGQKVPRNPIMGLLYHWKTCSPVTRYILGYFLTYWLLGLLLHCNFLPWT

SEQ ID NO: 1819 - protein, 273 aa, Homo sapiens
MLFFCGDLLSRSQIFYYSTGMTVGIVASLLIIIFILSKFMPKKSPIYVILVGGWSFSLYLIQLVFKNLQEIWRCYWQYLLSYVLTVGFMSFAVCYKYGPLENERSINLLTWTLQLMGLCFMYSGIQIPHIALAIIIIALCTKNLEHPIQWLYITCRKVCKGAEKPVPPRLLTEEEYRIQGEVETRKALEELREFCNSPDCSAWKTVSRIQSPKRFADFVEGSSHLTPNEVSVHEQEYGLGSIIAQDEIYEEASSEEEDSYSRCPAITQNNFLT

SEQ ID NO: 1820 - protein, 96 aa, Homo sapiens
  SITE (81): Xaa equals any of the naturally occurring L-amino acids
  SITE (83): Xaa equals any of the naturally occurring L-amino acids
  SITE (84): Xaa equals any of the naturally occurring L-amino acids
  SITE (96): Xaa equals any of the naturally occurring L-amino acids
MKVAVSPAVGPGPWGSGVGGGGTVRLLLILSGCLVYGTAETDVNVVMLQESQVCEKRASQQFCYTNVLIPKWHDIWTRIQXRXXSSRLVRVTQVEX

SEQ ID NO: 1821 - protein, 273 aa, Homo sapiens; identical to SEQ ID NO: 1819

SEQ ID NO: 1822 - protein, 273 aa, Homo sapiens; identical to SEQ ID NO: 1819

SEQ ID NO: 1823 - protein, 105 aa, Homo sapiens
  SITE (69): Xaa equals any of the naturally occurring L-amino acids
MFALAWKVIFSVMLQNPIRYPSVLGIKSSLLSSLVLVMVWGNEKSGPCPTPKSRKGRRSCPAQVGRGEXGSYWDPEFRLSRKSNQGLRRDYLSLYHFNLHFRDTF

SEQ ID NO: 1824 - protein, 105 aa, Homo sapiens [sequence omitted]

SEQ ID NO: 1825 - protein, 94 aa, Homo sapiens
MLLGFLVLIPWGSLILGSSDLDPSSLPLGTRGHGWRWPPLSPVQILYPLAGDPHAAVSCSCCGETELRALLTGSLPMEAFSGLHSIEYSSRTAC

SEQ ID NO: 1826 - protein, 94 aa, Homo sapiens; identical to SEQ ID NO: 1825

SEQ ID NO: 1827 - protein, 261 aa, Homo sapiens
MAVTACQGLGFVVSLIGIAGIIAATCMDQWSTQDLYNNPVTAVFNYQGLWRSCVRESSGFTECRGYFTLLGLPAMLQAVRALMIVGIVLGAIGLLVSIFALKCIRIGSMEDSAKANMTLTSGIMFIVSGLCAIAGVSVFANMLVTNFWMSTANMYTGMGGMVQTVQTRYTFGAALFVGWVAGGLTLIGGVMMCIACRGLAPEETNYKAVSYHASGHSVAYKPGGFKASTGFGSNTKNKKRYDGGARTEDEVQSYPSKHDYV

SEQ ID NO: 1828 - protein, 261 aa, Homo sapiens
  SITE (125): Xaa equals any of the naturally occurring L-amino acids
  SITE (127): Xaa equals any of the naturally occurring L-amino acids
MAVTACQGLGFVVSLIGIAGIIAATCMDQWSTQDLYNNPVTAVFNYQGLWRSCVRESSGFTECRGYFTLLGLPAMLQAVRALMIVGIVLGAIGLLVSIFALKCIRIGSMEDSAKANMTLTSGIMXIXSGLCAIAGVSVFANMLVTNFWMSTANMYTGMGGMVQTVQTRYTFGAALFVGWVAGGLTLIGGVMMCIACRGLAPEETNYKAVSYHASGHSVAYKPGGFKASTGFGSNTKNKKRYDGGARTEDEVQSYPSKHDYV

SEQ ID NO: 1829 - protein, 92 aa, Homo sapiens
MTSLLEGRMVLCVSCLLLPLLLLLKHFNGLMTPYLAHNVYCPIEYISFFPFHEKNIEYISIWFIFDSFKFIYSRLLCISQIYVLYRAYTLPH

SEQ ID NO: 1830 - protein, 92 aa, Homo sapiens; identical to SEQ ID NO: 1829

SEQ ID NO: 1831 - protein, 92 aa, Homo sapiens; identical to SEQ ID NO: 1829

SEQ ID NO: 1832 - protein, 270 aa, Homo sapiens
  SITE (113): Xaa equals any of the naturally occurring L-amino acids
  SITE (118): Xaa equals any of the naturally occurring L-amino acids
  SITE (157): Xaa equals any of the naturally occurring L-amino acids
  SITE (268): Xaa equals any of the naturally occurring L-amino acids
GEEFQPEGSKCTKCSCTGGRTQCVREVCPILSCPQHLSHIPPGQCCPKCLGQRKVFDLPFGSCLFRSDVYDNGSSFLYDNCTACTCRDSTVVCKRKCSHPGGCDQGQEGCCEXCLLRXPPEDIKVCKFGNKIFQDGEMWSSINCTICACVKGRTECXNKQCIPISSCPQGKILNRKGCCPICTEKPGVCTVFGDPHYNTFDGRTFNFQGTCQYVLTKDCSSPASPFQVLVKNDARRTRSFSWTKSVELVLGETGSACSSTSPCAGTAXAS

SEQ ID NO: 1833 - protein, 182 aa, Homo sapiens
  SITE (104): Xaa equals any of the naturally occurring L-amino acids
  SITE (147): Xaa equals any of the naturally occurring L-amino acids
  SITE (151): Xaa equals any of the naturally occurring L-amino acids
  SITE (176): Xaa equals any of the naturally occurring L-amino acids
  SITE (179): Xaa equals any of the naturally occurring L-amino acids
MLWFSGVGALAERYCRRSPGITCCVLLLLNCSGVPMSLASSFLTGSVAKCENEGEVLQIPFITDNPCIMCVCLNKEVTCKREKCPVLSRDCALAIKQRGACCEXCKGCTYEGNTYNSSFKWQSPAEPCVLRQCQEGVVTESGVRCVXHCKXPLEHLGMCCPTCPGCVFEGVQYQEXEEXQPE

SEQ ID NO: 1834 - protein, 47 aa, Homo sapiens
SSSLLIIYVCMMDVTIYMSCVEIKGCLDAMLILLSMRKYLKKLLHNI

SEQ ID NO: 1835 - protein, 445 aa, Homo sapiens
  SITE (147): Xaa equals any of the naturally occurring L-amino acids
  SITE (288): Xaa equals any of the naturally occurring L-amino acids
  SITE (293): Xaa equals any of the naturally occurring L-amino acids
  SITE (332): Xaa equals any of the naturally occurring L-amino acids
  SITE (443): Xaa equals any of the naturally occurring L-amino acids
MLWFSGVGALAERYCRRSPGITCCVLLLLNCSGVPMSLASSFLTGSVAKCENEGEVLQIPFITDNPCIMCVCLNKEVTCKREKCPVLSRDCALAIKQRGACCEQCKGCTYEGNTYNSSFKWQSPAEPCVLRQCQEGVVTESGVRCVXHCKNPLEHLGMCCPTCPGCVFEGVQYQEGEEFQPEGSKCTKCSCTGGRTQCVREVCPILSCPQHLSHIPPGQCCPKCLGQRKVFDLPFGSCLFRSDVYDNGSSFLYDNCTACTCRDSTVVCKRKCSHPGGCDQGQEGCCEXCLLRXPPEDIKVCKFGNKIFQDGEMWSSINCTICACVKGRTECXNKQCIPISSCPQGKILNRKGCCPICTEKPGVCTVFGDPHYNTFDGRTFNFQGTCQYVLTKDCSSPASPFQVLVKNDARRTRSFSWTKSVELVLGETGSACSSTSPCAGTAXAS

SEQ ID NO: 1836 - protein, 370 aa, Homo sapiens
LGGARVRRAVGLSGTGAEAGRAGAMVEKEEAGGGISEEEAAQYDRQIRLWGLEAQKRLRASRVLLVGLKGLGAEIAKNLILAGVKGLTMLDHEQVTPEDPGAQFLIRTGSVGRNRAEASLERAQNLNPMVDVKVDTEDIEKKPESFFTQFDAVCLTCCSRDVIVKVDQICHKNSIKFFTGDVFGYHGYTFANLGEHEFVEEKTKVAKVSQGVEDGPDTKRAKLDSSETTMVKKKVVFCPVKEALEVDWSSEKAKAALKRTTSDYFLLQVLLKFRTDKGRDPSSDTYEEDSELLLQIRNDVLDSLGISPDLLPEDFVRYCFSEMAPVCAVVGGILAQEIVKALSQRDPPHNNFFFFDGMKGNGIVECLGPK

SEQ ID NO: 1837 - protein, 42 aa, Homo sapiens
MVPSVTLILHCPGFSTESHMCGKPLSPRPTRTVGRPVSNIPV

SEQ ID NO: 1838 - protein, 89 aa, Homo sapiens
  SITE (17): Xaa equals any of the naturally occurring L-amino acids
  SITE (47): Xaa equals any of the naturally occurring L-amino acids
VQGVVQALKTDHAFCPXLQGTESIRLRILEFELNQVRSVSQELPPGXPESPQTDGQPPRAWPQLGMPSNPTCFSFLPGYSGLRSSALNF

SEQ ID NO: 1839 - protein, 346 aa, Homo sapiens
MVEKEEAGGGISEEEAAQYDRQIRLWGLEAQKRLRASRVLLVGLKGLGAEIAKNLILAGVKGLTMLDHEQVTPEDPGAQFLIRTGSVGRNRAEASLERAQNLNPMVDVKVDTEDIEKKPESFFTQFDAVCLTCCSRDVIVKVDQICHKNSIKFFTGDVFGYHGYTFANLGEHEFVEEKTKVAKVSQGVEDGPDTKRAKLDSSETTMVKKKVVFCPVKEALEVDWSSEKAKAALKRTTSDYFLLQVLLKFRTDKGRDPSSDTYEEDSELLLQIRNDVLDSLGISPDLLPEDFVRYCFSEMAPVCAVVGGILAQEIVKALSQRDPPHNNFFFFDGMKGNGIVECLGPK

SEQ ID NO: 1840 - protein, 155 aa, Homo sapiens
  SITE (92): Xaa equals any of the naturally occurring L-amino acids
  SITE (105): Xaa equals any of the naturally occurring L-amino acids
  SITE (125): Xaa equals any of the naturally occurring L-amino acids
  SITE (130): Xaa equals any of the naturally occurring L-amino acids
MQHQLHLLICWGKGSKSNTSCLGPVLSCSNMWSLALLVVAGSMGVAYSSVVMYVLLWVPLPLPSHFLPSGAPEAQPTTWAQSPHSVCKCGTXLGPAKPQGPSLPXPPCLIMLLSCRRQLGLAPSXWLPGXGSHGGELRGCSQGWAPGIAHLNICT

SEQ ID NO: 1841 - protein, 42 aa, Homo sapiens
YTFQCLSQTCSYDIKCYFLVAKIILDSVIKVYWNLNFKMSPD

SEQ ID NO: 1842 - protein, 265 aa, Homo sapiens
  SITE (22): Xaa equals any of the naturally occurring L-amino acids
PKLELHRGGGRSRTSGSPGLQXFGTRRTRGRSGRAQGRLKRPGKLACRKFPGRRQRVVPELTDVLMNEILHGADGTSIKCGIIGEIGCSWPLTESERKVLQATAHAQAQLGCPVIIHPGRSSRAPFQIIRILQEAGADISKTVMSHLDRTILDKKELLEFAQLGCYLEYDLFGTELLHYQLGPDIDMPDDNKRIRRVRLLVEEGCEDRILVAHDIHTKTRLMKYGGHGYSHILTNVVPKMLLRGITENVLDKILIENPKQWLTFK

SEQ ID NO: 1843 - protein, 503 aa, Homo sapiens
MEQRHVLLKQKELGGEEPEPSLREGPGGLVMEGHLFKRASNAFKTWSRRWFTIQSNQLVYQKKYKDPVTVVVDDLRLCTVKLCPDSERRFCFEVVSTSKSCLLQADSERLLQLWVSAVQSSIASAFSQARLDDSPRGPGQGSGHLAIGSAATLGSGGMARGREPGGVGHVVAQVQSVDGNAQCCDCREPAPEWASINLGVTLCIQCSGIHRSLGVHFSKVRSLTLDSWEPELVKLMCELGNVIINQIYEARVEAMAVKKPGPSCSRQEKEAWIHAKYVEKKFLTKLPEIRGRRGGRGRPRGQPPVPPKPSIRPRPGSLRSKPEPPSEDLGSLHPGALLFRASGHPPSLPTMADALAHGADVNWVNGGQDNATPLIQATAANSLLACEFLLQNGANVNQADSAGRGPLHHATILGHTGLACLFLKRGADLGARDSEGRDPLTIAMETANADIVTLLRLAKMREAEAAQGQAGDETYLDIFRDFSLMASDDPEKLSRRSHDLHTL

SEQ ID NO: 1844 - protein, 25 aa, Homo sapiens
MSPSIRILLVLQQLGSLMAPLPSAH

SEQ ID NO: 1845 - protein, 25 aa, Homo sapiens
MSPSIRILLVLQQLGSLMAPLPSAH

SEQ ID NO: 1846 - protein, 6 aa, Homo sapiens
VFQIYL

SEQ ID NO: 1847 - protein, 6 aa, Homo sapiens
VFQIYL

SEQ ID NO: 1848 - protein, 107 aa, Homo sapiens
MLVLLLDFLGLVHLGQLLIFHIYLKAKKMTTFEYLINNRKEESSKHQAVRKDPYVQMDKGVLQQGAGALGSSAQGVKAKSSLLIHKHLCHFCTSVNQDGDSTARVHL

SEQ ID NO: 1849 - protein, 245 aa, Homo sapiens
MLQARNQSPSSQRPLDVLRRNQDPQSPASISVIIFITPKEEPALQEGLHLQEDGLPATAEDAATCLTVLSSQPASCRASCCLRADGPGMLAHTCEHSTGKWEHSTRKWEHSTGKWEHSTGKWGLTALQNGSTVLGNGSTVLGSGSTVLRSGSTVLRNGSTLLRNGSTVLGNGHTVLGNGHTVLRNGSTVLGNGSTVLGNGSPQYWERGVHSTRKWEHSTGKWEHSTGKWEHSTGKPQTWILSFSA

SEQ ID NO: 1850 - protein, 209 aa, Homo sapiens
  SITE (136): Xaa equals any of the naturally occurring L-amino acids
  SITE (161): Xaa equals any of the naturally occurring L-amino acids
  SITE (169): Xaa equals any of the naturally occurring L-amino acids
  SITE (197): Xaa equals any of the naturally occurring L-amino acids
MAMGLFRVCLVVVTAIINHPLLFPRENATVPENEEEIIRKMQAHQEKLQLEQLRLEEEVARLAAEKEALEQVAEEGRQQNETRVAWDLWSTLCMILFLMIEVWRQDHQEGPSPECLGGEEDELPGWGAPPCRASPXPTRHACHFYERCIRGATADAARTRXFLEGFVDXLLEALRSLCNRDTDMEVEDFIGVDSMYXNWQVDRPLLCHL

SEQ ID NO: 1851 - protein, 547 aa, Homo sapiens
MAMGLFRVCLVVVTAIINHPLLFPRENATVPENEEEIIRKMQAHQEKLQLEQLRLEEEVARLAAEKEALEQVAEEGRQQNETRVAWDLWSTLCMILFLMIEVWRQDHQEGPSPECLGGEEDELPGLGGAPLQGLTLPNKATLGHFYERCIRGATADAARTREFLEGFVDDLLEALRSLCNRDTDMEVEDFIGVDSMYENWQVDRPLLCHLFVPFTPPEPYRFHPELWCSGRSVPLDRQGYGQIKVVRADGDTLSCICGKTKLGEDMLCLLHGRNSMAPPCGDMENLLCATDSLYLDTMQVMKWFQTALTRAWKGIAHKYEFDLAFGQLDSPGSLKIKFRSGKFMPFNLIPVIQCDDSDLYFVSHLPREPSEGTPASSTDWLLSFAVYERHFLRTTLKALPEGACHLSCLQIASFLLSKQSRLTGPSGLSSYHLKTALLHLLLLRQAADWKAGQLDARLHELLCFLEKSLLQKKLHHFFIGNRKVPEAMGLPEAVLRAEPLNLFRPFVLQRSLYRKTLDSFYEMLKNAPALISEYSLHVPSDQPTPKS

SEQ ID NO: 1852 - protein, 213 aa, Homo sapiens
LLFLSLLQMQELLGRGAWAPGCGRRPSGWGQLACPDPLLPPHNPKSPQPGPSTSGVWGEEQGLRTLSSEHPWQGLQPLISSLKPCGHTARRDLPLAPASFQPRVLIQGPRTVPPVLLCPQHKARLHSQKCSQALEGDPASSPTAPHPTHPSAAPLLFPRDLSYTGQEAAERVSPPPSKRSCSLCQNRVWAGGRALGARPLPLPAGFSWSLCWK

SEQ ID NO: 1853 - protein, 179 aa, Homo sapiens
  SITE (91): Xaa equals any of the naturally occurring L-amino acids
  SITE (140): Xaa equals any of the naturally occurring L-amino acids
  SITE (169): Xaa equals any of the naturally occurring L-amino acids
MGMGRGAGRSALGFWPTLAFLLCSFPAATSPCKILKCNSEFWSATSGSHAPASDDTPEFCAALRSYALCTRRTARTCRGDLAYHSAVHGIXDLMSQHNCSKDGPTSQPRLRTLPPAETARSARTAPRSAITRRAFTSTRXPPTTRTVASSGTHTFRTFTDRFQTCKVQXRLAAHRQLIT

SEQ ID NO: 1854 - protein, 357 aa, Homo sapiens
  SITE (140): Xaa equals any of the naturally occurring L-amino acids
  SITE (325): Xaa equals any of the naturally occurring L-amino acids
  SITE (329): Xaa equals any of the naturally occurring L-amino acids
  SITE (335): Xaa equals any of the naturally occurring L-amino acids
  SITE (338): Xaa equals any of the naturally occurring L-amino acids
  SITE (339): Xaa equals any of the naturally occurring L-amino acids
MGMGRGAGRSALGFWPTLAFLLCSFPAATSPCKILKCNSEFWSATSGSHAPASDDTPEFCAALRSYALCTRRTARTCRGDLAYHSAVHGIEDLMSQHNCSKDGPTSQPRLRTLPPAGDSQERSDSPEICHYEKSFHKHSXTPNYTHCGLFGDPHLRTFTDRFQTCKVQGAWPLIDNNYLNVQVTNTPVLPGSAATATSKLTIIFKNFQECVDQKVYQAEMDELPAAFVDGSKNGGDKHGANSLKITEKVSGQHVEIQAKYIGTTIVVRQVGRYLTFAVRMPEEVVNAVEDWDSQGLYLCLRGCPLNQQIDFQAFHTNAEGTGARXLAAXSLDPQXPRXXHTRQAVAKCKEKLPVEDL

SEQ ID NO: 1855 - protein, 434 aa, Homo sapiens
MGMGRGAGRSALGFWPTLAFLLCSFPAATSPCKILKCNSEFWSATSGSHAPASDDTPEFCAALRSYALCTRRTARTCRGDLAYHSAVHGIEDLMSQHNCSKDGPTSQPRLRTLPPAGDSQERSDSPEICHYEKSFHKHSATPNYTHCGLFGDPHLRTFTDRFQTCKVQGAWPLIDNNYLNVQVTNTPVLPGSAATATSKLTIIFKNFQECVDQKVYQAEMDELPAAFVDGSKNGGDKHGANSLKITEKVSGQHVEIQAKYIGTTIVVRQVGRYLTFAVRMPEEVVNAVEDWDSQGLYLCLRGCPLNQQIDFQAFHTNAEGTGARRLAAASPAPTAPETFPYETAVAKCKEKLPVEDLYYQACVFDLLTTGDVNFTLAAYYALEDVKMLHSNKDKLHLYERTRDLPGRAAAGLPLAPRPLLGALVPLLALLPVFC

SEQ ID NO: 1856 - protein, 712 aa, Homo sapiens
MGQGLKAWPRYRVVGSADAGQYNLEITDAELSDDASYECQATEAALRSRRAKLTVLIPPEDTRIDGGPVILLQAGTPHNLTCRAFNAKPAATIIWFRDGTQQEGAVASTELLKDGKRETTVSQLLINPTDLDIGRVFTCRSMNEAIPSGKETSIELDVHHPPTVTLSIEPQTVQEGERVVFTCQATANPEILGYRWAKGGFLIEDAHESRYETNVDYSFFTEPVSCEVHNKVGSTNVSTLVNVHFAPRIVVDPKPTTTDIGSDVTLTCVWVGNPPLTLTWTKKDSNMGPRPPGSPPEAALSAQVLSNSNQLLLKSVTQADAGTYTCRAIVPRIGVAEREVPLYVNGPPIISSEAVQYAVRGDGGKVECFIGSTPPPDRIAWAWKENFLEVGTLERYTVERTNSGSGVLSTLTINNVMEADFQTHYNCTAWNSFGPGTAIIQLEEREVLPVGIIAGATIGASILLIFFFIALVFFLYRRRKGSRKDVTLRKLDIKVETVNREPLTMHSDREDDTASVSTATRVMKAIYSSFKDDVDLKQDLRCDTIDTREEYEMKDPTNGYYNVRAHEDRPSSRAVLYADYRAPGPARFDGRPSSRLSHSSGYAQLNTYSRGPASDYGPEPTPPGPAAPAGTDTTSQLSYENYEKFNSHPFPGAAGYPTYRLGYPQAPPSGLERTPYEAYDPIGKYATATRFSYTSQHSDYGQRFQQRMQTHV

SEQ ID NO: 1857 - protein, 81 aa, Homo sapiens [sequence omitted]

SEQ ID NO: 1858 - protein, 81 aa, Homo sapiens [sequence omitted]

SEQ ID NO: 1859 - protein, 104 aa, Homo sapiens
MYWGIFFSILNFLAFFSLVLISVLLWTGMVVFRSLDPGAELVGFESHLYHCCVTSGNLPNFPGPQFSYIENGNNKSICFIGLLREFANSIYANLLDQCLAHNSQ

SEQ ID NO: 1860 - protein, 104 aa, Homo sapiens; identical to SEQ ID NO: 1859

SEQ ID NO: 1861 - protein, 75 aa, Homo sapiens
  SITE (23): Xaa equals any of the naturally occurring L-amino acids
  SITE (36): Xaa equals any of the naturally occurring L-amino acids
  SITE (44): Xaa equals any of the naturally occurring L-amino acids
MASYKTLKMLFSCLLTCSVSNEXYAVIFNFFPLYIXFLSDCFKXFSLSLVLSNLIIIYLGVIFFIFFVLDIHRSS

SEQ ID NO: 1862 - protein, 72 aa, Homo sapiens
  SITE (1): Xaa equals any of the naturally occurring L-amino acids
  SITE (10): Xaa equals any of the naturally occurring L-amino acids
  SITE (11): Xaa equals any of the naturally occurring L-amino acids
XYTFVNSRSXXLIDFLCVIMGHLFLVHFMPDILKFKTKYCEFYLVLCWIFFVFLSTIMSFLLGCSYSHWKQF

SEQ ID NO: 1863 - protein, 75 aa, Homo sapiens
MASYKTLKMLFSCLLTCSVSNEQYAVIFNFFPLYICFLSDCFKCFSLSLVLSNLIIIYLGVIFFIFFVLDIHRSS

SEQ ID NO: 1864 - protein, 63 aa, Homo sapiens
  SITE (37): Xaa equals any of the naturally occurring L-amino acids
MRLCQRPGLVLALPPQLSFSTARGGDSRMLGLPLGRXTSGKVQGDSTTVKLRFGLQLGVLGQR

SEQ ID NO: 1865 - protein, 157 aa, Homo sapiens
GQRGRPAATSHRILSSHSLASGCPVFRGGEGTGARSTPLALLLDPKARPDPFIPWGAPASAIGMRSLKSLHKQVRDPPTCRSWATPRAIPRGCGRTQPPTDRRPESSEGAIPIPTSGEARTAIVASGKTQLEPNGPCPHCNCAENVSQMTQIGSYFF

SEQ ID NO: 1866 - protein, 47 aa, Homo sapiens
MRLCQRPGLVLALPPQLSFSTARGGDSRMLGLPLGRGTLEGQGDPQL

SEQ ID NO: 1867 - protein, 89 aa, Homo sapiens [sequence omitted]

SEQ ID NO: 1868 - protein, 89 aa, Homo sapiens [sequence omitted]

SEQ ID NO: 1869 - protein, 93 aa, Homo sapiens [sequence omitted]

SEQ ID NO: 1870 - protein, 304 aa, Homo sapiens
  SITE (98): Xaa equals any of the naturally occurring L-amino acids
  SITE (166): Xaa equals any of the naturally occurring L-amino acids
  SITE (231): Xaa equals any of the naturally occurring L-amino acids
MSSSEMWTVLWHRFSMVLRLPEEASAQEGELSLSSPPSPEPDWTLISPQGIFLSHGSILMSILKHLLCPSFLNQLRQAPHGSEFLPVVVLSVCQLLCXPFALDMDADLLIDVLADLRDSEVAAHLLQVCCYHLPLMQVELPISLLTRLALMDPTSLNQFVNTVSAXPRTIVSFLSVALLSDQPLLTSDLLSLLAHTARVLSPSHLSFIQELLAGSDESYRPLRSSWATQRXLCGHTLIGSWDTCSNTAWPCVGHCRASLDCSAFCCLGLETRILLCGAVPALLWAMQPTRLVLWDLPWQLQCPV

SEQ ID NO: 1871 - protein, 91 aa, Homo sapiens
  SITE (54): Xaa equals any of the naturally occurring L-amino acids
  SITE (71): Xaa equals any of the naturally occurring L-amino acids
  SITE (89): Xaa equals any of the naturally occurring L-amino acids
MAVMCVAGLFFIPVAGLTGFHVVLVARGRTTNEQVTGKFRGGVNPFTNGCCNNXSRVLCSSPAPRYLGRPXKEKTIVIRPPFLRPRSFXWA

SEQ ID NO: 1872 - protein, 210 aa, Homo sapiens
MAVMCVAGLFFIPVAGLTGFHVVLVARGRTTNEQVTGKFRGGVNPFTNGCCNNVSRVLCSSPAPRYLGRPKKEKTIVIRPPFLRPEVSDGQITVKIMDNGIQGELRRTKSKGSLEITESQSADAEPPPPPKPDLSRYTGLRTHLGLATNEDSSLLAKDSPPTPTMYKYRPGYSSSSTSAAMPHSSSAKVLSTLRGGVITCQLARHSGSFL

SEQ ID NO: 1873 - protein, 193 aa, Homo sapiens
  SITE (53): Xaa equals any of the naturally occurring L-amino acids
MGPLSPARTLRLWGPRSLGVALGVFMTIGFALQLLGGPFQRRLPGLQLRQPSXPSLRPALPSCPPRQRLVFLKTHKSGSSSVLSLLHRYGDQHGLRFALPARYQFGYPKLFQASRVKGYRPQGGGTQLPFHILCHHMRFNLKEVLQVMPSDSFFFSIVRDPAALARSAFSYYKSTSSAFRKSPSLAAFLANPR

SEQ ID NO: 1874 - protein, 461 aa, Homo sapiens
  SITE (28): Xaa equals any of the naturally occurring L-amino acids
  SITE (168): Xaa equals any of the naturally occurring L-amino acids
  SITE (169): Xaa equals any of the naturally occurring L-amino acids
  SITE (171): Xaa equals any of the naturally occurring L-amino acids
  SITE (178): Xaa equals any of the naturally occurring L-amino acids
  SITE (442): Xaa equals any of the naturally occurring L-amino acids
MTIGFALQLLGGPFQRRLPGLQLRQPSXPSLRPALPSCPPRQRLVFLKTHKSGSSSVLSLLHRYGDQHGLRFALPARYQFGYPKLFQASRVKGYRPQGGGTQLPFHILCHHMRFNLKEVLQVMPSDSFFFSIVRDPAALARSAFSYYKSTSSAFRKSPSLAAFLANPXXFXRPGARGXHYARNLLWFDFGLPFPPEKRAKRGNIHPPRDPNPPQLQVLPSGAGPRAQTLNPNALIHPVSTVTDHRSQISSPASFDLGSSSFIQWGLAWLDSVFDLVMVAEYFDESLVLLADALCWGLDDVVGFMHNAQAGHKQGLSTVSNSGLTAEDRQLTARARAWNNLDWALYVHFNRSLWARIEKYGQGRLQTAVAELRARREALAKHCLVGGEASDPKYITDRRFRPFQFGSAKVLGYILRSGLSPQDQEECERLATPELQYKDKLDXKQFPPTVSLPLKTSRPLSP

SEQ ID NO: 1875 - protein, 191 aa, Homo sapiens
MGPLSPARTLRLWGPRSLGVALGVFMTIGFALQLLGGPFQRRLPGLQLRQPSAPSLRPALPSCPPRQRLVFLKTHKSGSSSVLSLLHRYGDQHGLRFALPARYQFGYPKLFQASRVKGYRPQGGGTQLPFHILCHHMRFNLKEVLQVMPSDSFFFSIVRDPAGLARSAFSYYKSTSSTFRKSPSLAAFLAN

SEQ ID NO: 1876 - protein, 83 aa, Homo sapiens
  SITE (65): Xaa equals any of the naturally occurring L-amino acids
MAPAIVTLGLLLPLAPADLCLPALGSSRLPRGPPQLPSIPVSQPLPRGFLREHPQPHKLQPIPPXSQKALFLEPRRRLWPPSP

SEQ ID NO: 1877 - protein, 96 aa, Homo sapiens
MSIPMVSVLLCQAPLLIQVALPRTVAIRKKRLCLVDSILQTWHLFNFFLVGFIFQSIFRFTAKLSESTEISHLFFAPTQAKPHLLPISPTREVHLL

SEQ ID NO: 1878 - protein, 86 aa, Homo sapiens
MSFRSELAMWFQAALVSSLVLPTPPGSGGTSRRKKWIKSWRDFKQYLTHSSRHDSHQLRSSNAFLFDAQEGPSAVDIAKDEIQRQR

SEQ ID NO: 1879 - protein, 130 aa, Homo sapiens
  SITE (67): Xaa equals any of the naturally occurring L-amino acids
MLQTTLPSSQTVSLCLWVGASQPPPSFLCCQLQVFLCLLHTTRRCPSALPALVRVVPVSHCQTSWLXCGDLFLCLRSFLRSVHSSGVSPCLEQIASPFSTCLLKLWSTCDCKFSAATPEPSSSHSFTFMD

SEQ ID NO: 1880 - protein, 96 aa, Homo sapiens
MLMVRLFNSFPHALLILFLWGEQSPLTKPCPTHWAPVWMVPGPQVLWGTHWGLPGNHFCRIRSHTRRAQCPREGPFPTTLPHWGWVTGTYRGWCCL

SEQ ID NO: 1881 - protein, 122 aa, Homo sapiens
MLMVRLFNSFPHALLILFLWGEQSPLTKPCPTHWAPVWMVPGPQVLWGTHWGLPGNHFCRIRSHTRRAQCPREGPFPTTLPHWGWVTGTYRGWCCLASPACGGSWVLLPFGFVFYLSGWASF

SEQ ID NO: 1882 - protein, 122 aa, Homo sapiens; identical to SEQ ID NO: 1881

SEQ ID NO: 1883 - protein, 65 aa, Homo sapiens
MPRSSWRPAPSRPWMPWSCASSWSTSGLWTLLCTRAACTSSQRPTTTCWDQPRRLTLLCSGACSR

SEQ ID NO: 1884 - protein, 66 aa, Homo sapiens
  SITE (14): Xaa equals any of the naturally occurring L-amino acids
  SITE (28): Xaa equals any of the naturally occurring L-amino acids
SQLLGRLRQENRLXPGGGGWSERRSCHXTPAWVTERQTVSKKKKKKKNVRKEVESYFHLYFSHCLA

SEQ ID NO: 1885 - protein, 242 aa, Homo sapiens
  SITE (172): Xaa equals any of the naturally occurring L-amino acids
  SITE (197): Xaa equals any of the naturally occurring L-amino acids
  SITE (198): Xaa equals any of the naturally occurring L-amino acids
  SITE (205): Xaa equals any of the naturally occurring L-amino acids
  SITE (214): Xaa equals any of the naturally occurring L-amino acids
  SITE (228): Xaa equals any of the naturally occurring L-amino acids
  SITE (233): Xaa equals any of the naturally occurring L-amino acids
  SITE (236): Xaa equals any of the naturally occurring L-amino acids
MHRLAPHCSFARWLLCNGSLFRYKHPSEEELRALAGKPRPRGRKERWANGLSEEKPLSVPRDAPFQLETCPLTTVDALVLRFFLEYQWFVDFAVYSGGVYLFTEAYYYMLGPAKETNIAVFWCLLTVTFSIKMFLTVTRLYFSAEEGGERSVCLTFAFLFLLLAMLVQVVRXETLELGLDLAGSMTQNLEPLLKKQXXDWALPVXKLLSRDCMXLGWCFYFSWVATRXCIEKXYLXKSVCTG

SEQ ID NO: 1886 - protein, 479 aa, Homo sapiens
MAVLGVQLVVTLLTATLMHRLAPHCSFARWLLCNGSLFRYKHPSEEELRALAGKPRPRGRKERWANGLSEEKPLSVPRDAPFQLETCPLTTVDALVLRFFLEYQWFVDFAVYSGGVYLFTEAYYYMLGPAKETNIAVFWCLLTVTFSIKMFLTVTRLYFSAEEGGERSVCLTFAFLFLLLAMLVQVVREETLELGLEPGLASMTQNLEPLLKKQGWDWALPVAKLAIRVGLAVVGSVLGAFLTFPGLRLAQTHRDALTMSEDRPMLQFLLHTSFLSPLFILWLWTKPIARDFLHQPPFGETRFSLLSDSAFDSGRLWLLVVLCLLRLAVTRPHLQAYLCLAKARVEQLRREAGRIEAREIQQRVVRVYCYVTVVSLQYLTPLILTLNCTLLLKTLGGYSWGLGPAPLLSPDPSSASAAPIGSGEDEVQQTAARIAGALGGLLTPLFLRGVLAYLIWWTAACQLLASLFGLYFHQHLAGS

SEQ ID NO: 1887 - protein, 122 aa, Homo sapiens
MRHHTWLIFLILIFVEMGGQVSLCCPGCSRTPGHKPSSHLSLPMRRNYRWLRCEPPCLAFLHYLEIRWEEAFFWVGLRRHTEVPQVIGAGPLPFSPPWVVVDRSLGWDGEERSCCVSCLLFK

SEQ ID NO: 1888 - protein, 122 aa, Homo sapiens; identical to SEQ ID NO: 1887

SEQ ID NO: 1889 - protein, 92 aa, Homo sapiens
MELVFLIISLVCQHCSPDSAGDLCVQTPSVWPRTLMEIMLSSLGEFALSNNQRFVCFNNIHSSWAWWLTSVIPALWEADTGGLLEARSLRPA

SEQ ID NO: 1890 - protein, 92 aa, Homo sapiens; identical to SEQ ID NO: 1889

SEQ ID NO: 1891 - protein, 99 aa, Homo sapiens
  SITE (96): Xaa equals any of the naturally occurring L-amino acids
MFAFSPLSRLAMLGVCCGCCLGLFLESDTGINFLNFNYLASYSWSSRSSNFNNLGIFSFFFFETESRSVAQAGVQWHYLSSLQALPPGFTPFSCLXPTE

SEQ ID NO: 1892 - protein, 100 aa, Homo sapiens
MFAFSPLSRLAMLGVCCGCCLGLFLESDTGINFLNFNYLASYSWSSRSSNFNNLGIFSFFFFETESRSVAQAGVQWHYLSSLQALPPGFTPFSCLSLPSS

SEQ ID NO: 1893 - protein, 167 aa, Homo sapiens; identical to SEQ ID NO: 1674
  SITE (140): Xaa equals any of the naturally occurring L-amino acids

SEQ ID NO: 1894 - protein, 167 aa, Homo sapiens; identical to SEQ ID NO: 1674
  SITE (140): Xaa equals any of the naturally occurring L-amino acids

SEQ ID NO: 1895 - protein, 93 aa, Homo sapiens
MKEQSLPSFLWKMLLWYCLVCCDTLESFVSVFSLYPGTALGIWEALTVYGRCAQFFCFQGAKEVAVHMETFLFLECEGWGPKQVPNAAAFLLV

SEQ ID NO: 1896 - protein, 41 aa, Homo sapiens [sequence omitted]

SEQ ID NO: 1897 - protein, 93 aa, Homo sapiens; identical to SEQ ID NO: 1895

SEQ ID NO: 1898 - protein, 117 aa, Homo sapiens
  SITE (89): Xaa equals any of the naturally occurring L-amino acids
  SITE (111): Xaa equals any of the naturally occurring L-amino acids
  SITE (116): Xaa equals any of the naturally occurring L-amino acids
MTSIWHRPVCPLSWLVPSAAFSNWGPGCRAVCSPRWATPAKIPTPKCDRVAHEEGSALRVPSRVHSSSQLLRVAPASPTSSLSPVMSRXPPPSRVSVWLFVCLPTRLPVPXALPLXP

SEQ ID NO: 1899 - protein, 38 aa, Homo sapiens
ISHVLIDAYISLKRIKSSCNPTTLGMCSEDLLRLCHWS

SEQ ID NO: 1900 - protein, 88 aa, Homo sapiens
MTSIWHRPVCPLSWLVPSAAFSNWGPGCRAVCSPRWATPAKIPTPKCDRVAHEEGSALRVPSRVHSSSQLLRVAPASPTSSLSPVMSR

SEQ ID NO: 1901 - protein, 88 aa, Homo sapiens; identical to SEQ ID NO: 1900

SEQ ID NO: 1902 - protein, 113 aa, Homo sapiens
  SITE (57): Xaa equals any of the naturally occurring L-amino acids
  SITE (73): Xaa equals any of the naturally occurring L-amino acids
MNSAFSTCLLLLQDLGVPLTLTGLPPALGLAPPVLEPRAPGLELPLWGGSQAPPLPXLSSVPCSAPPLYLSVXRPLTERRCRVSRGPRWSQGQGWDLQGTRGAHGLRHLCPGS

SEQ ID NO: 1903 - protein, 117 aa, Homo sapiens
MWRVSISVPWLWSAWPISSVGFLCLPASPHPSLPPSSTLHDLAVTSGPERWRQLTAAARTVSRVRSAAGWGSWPCPASMNSCPRTVCLWNLRSIYCVCSSRLSTSCRKSPRITMPTQ

SEQ ID NO: 1904 - protein, 117 aa, Homo sapiens; identical to SEQ ID NO: 1903

SEQ ID NO: 1905 - protein, 124 aa, Homo sapiens
  SITE (118): Xaa equals any of the naturally occurring L-amino acids
MIKSAPVGPVAGGIMGCIMVLVLAVYAYRHQIHRRSHQHMSPLAAQEMSVRMSNLENDRDERDDDSHEDRGIISNTRFIAAVIERHAHSPERRRRYWGRSGTESDHGYSTMSPQEDSXKSSMQQ

SEQ ID NO: 1906 - protein, 165 aa, Homo sapiens
  SITE (145): Xaa equals any of the naturally occurring L-amino acids
  SITE (147): Xaa equals any of the naturally occurring L-amino acids
  SITE (148): Xaa equals any of the naturally occurring L-amino acids
  SITE (152): Xaa equals any of the naturally occurring L-amino acids
MAVYLLWQELGPAVLAGVAVLVFVIPINALAATKIKKLKVSLATLCVYFLLDEGNILTATKVFTSMSLFNILRIPLFELPTVISAVVQTKISLGRLEDFLNTEELLPQSIETNYTGDHAIGFTDASFSWDKTGMPVLKEALWLMXLXXPGFXIAFCKKTFSLAPS

SEQ ID NO: 1907 - protein, 50 aa, Homo sapiens
CYRCIFSIVSNRFIFSNPWISSCIFTISKQSDSIAKRQKCEFFFKLVNTC

SEQ ID NO: 1908 - protein, 84 aa, Homo sapiens
MIMSSVTLLWSILHQADSSEKMTIAASASLTTINLGATKNLRQQILELLGPISMNHGVHFMAAIAFVWNERRQNKTTTRTKVCI

SEQ ID NO: 1909 - protein, 84 aa, Homo sapiens; identical to SEQ ID NO: 1908

SEQ ID NO: 1910 - protein, 275 aa, Homo sapiens
  SITE (71): Xaa equals any of the naturally occurring L-amino acids
  SITE (153): Xaa equals any of the naturally occurring L-amino acids
MWSYHLIGLIWTSEFILACQQMTIAGAVVTCYFNRSKNDPPDHPILSSLSILFFYHQGTIVKGSFLISVVXIPRIIVMYMQNALKEQQHGALSRYLFRCCYCCFWCLDKYLLHLNQNAYTTTAINGTDFCTSAKDAFKILSKNSSHFTSINCXGDFIIFLGKVLVVCFTVFGGLMAFNYNRAFQVWAVPLLLVAFFAYLVAHSFLSVFETVLDALFLCFAVDLETNDGSSEKPYFMDQEFLSFVKRSNKLNNARAQQDKHSLRNEEGTELQAIVR

SEQ ID NO: 1911 - protein, 275 aa, Homo sapiens [sequence omitted]

SEQ ID NO: 1912 - protein, 136 aa, Homo sapiens
  SITE (133): Xaa equals any of the naturally occurring L-amino acids
MACILKRKSVIAVSFIAAFLFLLVVRLVNEVNFPLLLNCFGQPGTKWIPFSYTYRRPLRTHYGYINVKTQEPLQLDCDLCAIVSNSGQMVGQKVGNEIDRSSCIWRMNNAPTKGYEEDVGRMTMIRVVPIPAXLFC

SEQ ID NO: 1913 - protein, 64 aa, Homo sapiens
VFTSAKYYGELSLKCAILDKGLLPTLFCNFDTSIFTPINITKPQFYRWKELLFFCCSLMQFLIL

SEQ ID NO: 1914 - protein, 305 aa, Homo sapiens [sequence omitted]

SEQ ID NO: 1915 - protein, 305 aa, Homo sapiens [sequence omitted]

SEQ ID NO: 1916 - protein, 80 aa, Homo sapiens
  SITE (65): Xaa equals any of the naturally occurring L-amino acids
MDSGGWMDGDTRQAFPCPWGLVSLPLAGVTLALHVFTASALPRELRSEKDWPGQSPGPIVSVPGXQEGILEGGPGTQFAL

SEQ ID NO: 1917 - protein, 331 aa, Homo sapiens
  SITE (249): Xaa equals any of the naturally occurring L-amino acids
  SITE (257): Xaa equals any of the naturally occurring L-amino acids
  SITE (298): Xaa equals any of the naturally occurring L-amino acids
  SITE (300): Xaa equals any of the naturally occurring L-amino acids
  SITE (301): Xaa equals any of the naturally occurring L-amino acids
MDRLKSHLTVCFLPSVPFLILVSTLATAKSVTNSTLNGTNVVLGSVPVIIARTDHIIVKEGNSALINCSVYGIPDPQFKWYNSIGKLLKEEEDEKERGGGKWQMHDSGLLNITKVSFSDRGKYTCVASNIYGTVNNTVTLRVIFTSGDMGVYYMVVCLVAFTIVMVLNITRLCMMSSHLKKTEKAINEFFRTEGAEKLQKAFEIAKRIPIITSAKTLELAKVTQFKTMEFARYIEELARSVPLPPLIMXCRTIMEEXMEVVGLEEQGQNFVRHTPEGQEAADRDEVYTIPNSLKRSDXPXXVLGRLIAARATSANCHQGVSSPAVQKRACR

SEQ ID NO: 1918 - protein, 77 aa, Homo sapiens
VGSLLGSSLVALLSLPGGWLHCPKDFGNINNCRMDLYFFLLAGIQAVTALLFVWIAGRYERASQGPASHSRFSRDRG

SEQ ID NO: 1919 - protein, 91 aa, Homo sapiens [sequence omitted]

SEQ ID NO: 1920 - protein, 91 aa, Homo sapiens [sequence omitted]

SEQ ID NO: 1921 - protein, 108 aa, Homo sapiens
MSLTPPTPVLFLFLSLLWARFFLSRLKCPGGCLCWPLLLSRGSSAAPWASVPMDGAAHAAISAPGLSVQLLPRQLASPSANTELRVLLLPARVRHYLPSSFHQVLGSS

SEQ ID NO: 1922 - protein, 108 aa, Homo sapiens; identical to SEQ ID NO: 1921

SEQ ID NO: 1923 - protein, 81 aa, Homo sapiens
  SITE (29): Xaa equals any of the naturally occurring L-amino acids
SFLFFFFFFFETGFRSVFQAGVQWCDLGXLPPRFKKFSCLSLPSSWDYRHALPHPVTFFCVFLVEMAFAMLAMAGLKLLAS

SEQ ID NO: 1924 - protein, 108 aa, Homo sapiens; identical to SEQ ID NO: 1921

SEQ ID NO: 1925 - protein, 136 aa, Homo sapiens
  SITE (59): Xaa equals any of the naturally occurring L-amino acids
  SITE (111): Xaa equals any of the naturally occurring L-amino acids
MYQPHTQSWFPWCLILSSSQAGTRGLSWHLANAPVKPGMGLAFALIRLDSLLTCYLPCXHVRLVRAHTCTSPTRPLLSYQSVPAASMICPPCEIPHGEGSFEVAGRSTEMXHLPVEIPRLPGQCQQSQKTHPLAWS

SEQ ID NO: 1926 - protein, 136 aa, Homo sapiens
MYQPHTQSWFPWCLILSSSQAGTRGLSWHLANAPVKPGMGLAFALIRLDSLLTCYLPCLHVRLVRAHTCTSPTRPLLSYQSVPAASMICPPCEIPHGEGSFEVAGRSTEMSHLPVEIPRLPGQCQQSQKTHPLAWS

SEQ ID NO: 1927 - protein, 86 aa, Homo sapiens [sequence omitted]

SEQ ID NO: 1928 - protein, 99 aa, Homo sapiens [sequence omitted]

SEQ ID NO: 1929 - protein, 99 aa, Homo sapiens [sequence omitted]

SEQ ID NO: 1930 - protein, 84 aa, Homo sapiens
  SITE (65): Xaa equals any of the naturally occurring L-amino acids
MWSSSWDHRITTPRLANFFFFFFFFFFVEMGFRYVGQAGLKLLASSNLPALASQSAGITGVSHHXWLGGLIKTPILSLTPRVSG

SEQ ID NO: 1931 - protein, 178 aa, Homo sapiens [sequence omitted]

SEQ ID NO: 1932 - protein, 468 aa, Homo sapiens
  SITE (19): Xaa equals any of the naturally occurring L-amino acids
  SITE (125): Xaa equals any of the naturally occurring L-amino acids
MNSQNSGFTQRRRMALGIXILLLVDVIWVASSELTSYVFTQYNKPFFSTFAKTSMFVLYLLGFIIWKPWRQQCTRGLRGKHAAFFADAEGYFAACTTDTTMNSSLSEPLYVPVKFHDLPSEKPEXTNIDTEKTPKKSRVRFSNIMEIRQLPSSHALEAKLSRMSYPVKEQESILKTVGKLTATQVAKISFFFCFVWFLANLSYQEALSDTQVAIVNILSSTSGLFTLILAAVFPSNSGDRFTLSKLLAVILSIGGVVLVNLAGSEKPAGRDTVGSIWSLAGAMLYAVYIVMIKRKVDREDKLDIPMFFGFVGLFNLLLLWPGFFLLHYTGFEDFEFPNKVVLMCIIINGLIGTVLSEFLWLWGCFLTSSLIGTLALSLTIPLSIIADMCMQKVQFSWLFFAGAIPVFFSFFIVTLLCHYNNWDPVMVGIRRIFAFICRKHRIQRVPEDSEQCESLISMHSVSQEDGAS

SEQ ID NO: 1933 - protein, 178 aa, Homo sapiens [sequence omitted]

SEQ ID NO: 1934 - protein, 116 aa, Homo sapiens
  SITE (95): Xaa equals any of the naturally occurring L-amino acids
  SITE (112): Xaa equals any of the naturally occurring L-amino acids
MLVAWCLAPGDLLLLVIITLPRKEVTGSMSTVCQCEAQPAMLPKGHFTHHSPKAARKAQEGTRKARWVALEDSAPFHPSPGWGLILQLHPQPMNXSQSAWKHCCWKNCEEPXEGKK

SEQ ID NO: 1935 - protein, 74 aa, Homo sapiens
  SITE (69): Xaa equals any of the naturally occurring L-amino acids
KTPHSWVIHAGEASCHVERTLKQSYGAAHMRGTEAPSHQPCEPPWKWSLQHQSSFQMIAAPNTILTSIXRTSAS

SEQ ID NO: 1936 - protein, 127 aa, Homo sapiens
  SITE (85): Xaa equals any of the naturally occurring L-amino acids
  SITE (88): Xaa equals any of the naturally occurring L-amino acids
  SITE (95): Xaa equals any of the naturally occurring L-amino acids
  SITE (107): Xaa equals any of the naturally occurring L-amino acids
  SITE (123): Xaa equals any of the naturally occurring L-amino acids
MKREGRCVLHMHPSSPPSRLSFFLFLRQSLALLPRLECSGVILAQRNLRLLGSRDSPASASCCPPSSLSRRWRWREVPEGLWGLXWVXLCSLSAXWTALKGSSPPFXAKQLGHHRNGINLAEXSLPK

SEQ ID NO: 1937 - protein, 44 aa, Homo sapiens
LMPVIPAIWETEAGGLLEARSLRQPGQHSETPSLQETFKNKNSS

SEQ ID NO: 1938 - protein, 89 aa, Homo sapiens
MNHRAWPFLPFFFFFLRRSLALSPRLECSGAVSAHCGLRLPGSRHSPASASRVAGTAGARYHARLVFFVFLVETGFHRVGQDGLDLLTS

SEQ ID NO: 1939 - protein, 89 aa, Homo sapiens; identical to SEQ ID NO: 1938

SEQ ID NO: 1940 - protein, 223 aa, Homo sapiens
  SITE (159): Xaa equals any of the naturally occurring L-amino acids
  SITE (208): Xaa equals any of the naturally occurring L-amino acids
  SITE (218): Xaa equals any of the naturally occurring L-amino acids
  SITE (221): Xaa equals any of the naturally occurring L-amino acids
MLHVTRGVWGSRVRVWPLLPALLGPPRALSSLAAKMGEYRKMWNPREPRDWAQQYRERFIPFSKEQLLRLLIQALYDPINPDRETLDQPSLTDPQRLSNEQEVLRALEPLLAQANFSPLSEDTLAYALVVHHPQDEVQVTVNLDQYVYIHFWALGQPSXADAPEVQRGLQACLLSPKLPLRERRYFKRVVLASPDQNGDTWDLKKFSXTPPLGKAWEXLLXGT

SEQ ID NO: 1941 - protein, 169 aa, Homo sapiens
  SITE (4): Xaa equals any of the naturally occurring L-amino acids
  SITE (18): Xaa equals any of the naturally occurring L-amino acids
  SITE (24): Xaa equals any of the naturally occurring L-amino acids
  SITE (108): Xaa equals any of the naturally occurring L-amino acids
SPKXPPAERRYFKRVVLXARTKRXHLVLKSFKDTPLEGLEQLLPELKVRTPTLQRALLNLMLVVSGVAIFVNVGMVVLTDLKVATSLLLLLFAIFMGLRASKCRAALXSCTGCSPSKDSWPRGQVEADTQLVSACQNACPVSRLSQPRGELPFTDSSQGWHRPQECRLV

SEQ ID NO: 1942 - protein, 327 aa, Homo sapiens
MLHVTRGVWGSRVRVWPLLPALLGPPRALSSLAAKMGEYRKMWNPREPRDWAQQYRERFIPFSKEQLLRLLIQALYDPINPDRETLDQPSLTDPQRLSNEQEVLRALEPLLAQANFSPLSEDTLAYALVVHHPQDEVQVTVNLDQYVYIHFWALGQRVGQMPLKSSVGSRRVFFTKLPPAERRYFKRVVLAARTKRGHLVLKSFKDTPLEGLEQLLPELKVRTPTLQRALLNLMLVVSGVAIFVNVGMVVLTDLKVATSLLLLLFAIFMGLRASKCRAALNSCTGCSPSKDSWPRGQVEADTQLVLRLPKCVSCLEAESAQRGAAFY

SEQ ID NO: 1943 - protein, 118 aa, Homo sapiens
MKDLWFLLLVVAAPTWVLSQVRLQESGPGLVSPSQTLSLTCSVSGINIGGGKYYWAWVRQRPGEGPEWVGYISYTGVADYNPSLRGRLTISLGESNSFSLTLTSMTAADAVVYYCATD

SEQ ID NO: 1944 - protein, 174 aa, Homo sapiens
KGVFYFFIFYLPLFSWLCSRVCVFACLLSCSFFFWMKTPAFPDSPPSSVLQFSEKSWDMWEGAWELGSLRLPGRQFRLCRKEQSPWEALGEGGAAGPARMVLPATGGLRVVSAPCISPSLLTFLLCFPPSVCQRGGTGNRTAVAALSLLSTVYSGLSGDSREPGHLAAVRPLNL

SEQ ID NO: 1945 - protein, 162 aa, Homo sapiens
  SITE (115): Xaa equals any of the naturally occurring L-amino acids
  SITE (143): Xaa equals any of the naturally occurring L-amino acids
MASALSYVSKFKSFVILFVTPLLLLPLVILMPAKVCVQYMKDTNMLFLGGLIVAVAVERWNLHKRIALRTLLWVGAKPARLMLGFMGVTALLSMWISNTATTAMMVPIVEAILQXMEATSAATEAGLELVDKGKAKELPGSQXIFEGPTLGQQEDQRAEEVV

SEQ ID NO: 1946 - protein, 173 aa, Homo sapiens
  SITE (59): Xaa equals any of the naturally occurring L-amino acids
  SITE (130): Xaa equals any of the naturally occurring L-amino acids
EEPQDHTHSPYPPQDYRTFWHTLYRVLGFTPQNDPTMSTHHQNPANGPPLPPSPDAEMXMGSWRVGSEMKGTPQWAAGPIFPKPCHYLCEGGQVAEGSGCRLLYPLCLKHPPHRALVFTRFVLDSLNGNXIPWLRAKTTTYQCPCPFQLTLSSLRSSLSLWKGHPSQGRNAWS

SEQ ID NO: 1947 - protein, 407 aa, Homo sapiens
  SITE (193): Xaa equals any of the naturally occurring L-amino acids
  SITE (357): Xaa equals any of the naturally occurring L-amino acids
MASALSYVSKFKSFVILFVTPLLLLPLVILMPAKVCVQYMKDTNMLFLGGLIVAVAVERWNLHKRIALRTLLWVGAKPARLMLGFMGVTALLSMWISNTATTAMMVPIVEAILQQMEATSAATEAGLELVDKGKAKELPGSQVIFEGPTLGQQEDQERKRLCKAMTLCICYAASIGGTATLTGTGPNVVLLGXMNELFPDSKDLVNFASWFAFAFPNMLVMLLFAWLWLQFVYMRFKYVSDATVAIFVATLLFIVPSQKPKFNFRSQTEEERKTPFYPPPLLDWKVTQEKVPWGIVLLLGGGFALAKGSEASGLSVWMGKQMEPLHAVPPAAITLILSLLVAVFTECTSNVATTTLXLPIFASMVKTGVIMNIIGVFCVFLAVNTWGRAIFDLDHFPDWANVTHIET

SEQ ID NO: 1948 - protein, 162 aa, Homo sapiens
MASALSYVSKFKSFVILFVTPLLLLPLVILMPAKVCVQYMKDTNMLFLGGLIVAVAVERWNLHKRIALRTLLWVGAKPARLMLGFMGVTALLSMWISNTATTAMMVPIVEAILQQMEATSAATEAGLELVDKGKAKELPGSQVIFEGPTLGQQEDQERKRLC

SEQ ID NO: 1949 - protein, 377 aa, Homo sapiens
  SITE (327): Xaa equals any of the naturally occurring L-amino acids
MPAKVCVQYMKDTNMLFLGGLIVAVAVERWNLHKRIALRTLLWVGAKPARLMLGFMGVTALLSMWISNTATTAMMVPIVEAILQQMEATSAATEAGLELVDKGKAKELPGSQVIFEGPTLGQQEDQERKRLCKAMTLCICYAASIGGTATLTGTGPNVVLLGQMNELFPDSKDLVNFASWFAFAFPNMLVMLLFAWLWLQFVYMRFKYVSDATVAIFVATLLFIVPSQKPKFNFRSQTEEERKTPFYPPPLLDWKVTQEKVPWGIVLLLGGGFALAKGSEASGLSVWMGKQMEPLHAVPPAAITLILSLLVAVFTECTSNVATTTLXLPIFASMVKTGVIMNIIGVFCVFLAVNTWGRAIFDLDHFPDWANVTHIET

SEQ ID NO: 1950 - protein, 104 aa, Homo sapiens
  SITE (63): Xaa equals any of the naturally occurring L-amino acids
  SITE (74): Xaa equals any of the naturally occurring L-amino acids
  SITE (103): Xaa equals any of the naturally occurring L-amino acids
MSLLLLLSVLMSPGARPSDPVEVIASGPTVASSHNVQDCLHILNRYGLRAALPRSVKTVLSRXDSDPHGPHTCXHVLNVIIGSNVLALAEAQRQAEALGYKLXC

SEQ ID NO: 1951 - protein, 81 aa, Homo sapiens
QVPMSWTPTSCSCGLGDGIGHILGVQRRPTRARSDGRASQTGRWGLPPTPEDEDKPLGQFSVPVLLPWAASLLSPSPCFFL

SEQ ID NO: 1952 - protein, 295 aa, Homo sapiens
MSLLLLLSVLMSPGARPSDPVEVIASGPTVASSHNVQDCLHILNRYGLRAALPRSVKTVLSRADSDPHGPHTCGHVLNVIIGSNVLALAEAQRQAEALGYQAVVLSAAMQGDVKSMAQFYGLLAHVARTRLTPSMAGASVEEDAQLHELAAELQIPDLQLEEALETMAWGRGPVCLLAGGEPTVQLQGSGRGGRNQELALRVGAELRRWPLGPIDVLFLSGGTDGQDGPTEAAGAWVTPELASQAAAEGLDIATFLAHNDSHTFFCCLQGGAHLLHTGMTGTNVMDTHLLFLRPR

SEQ ID NO: 1953 - protein, 116 aa, Homo sapiens
MWWALCSMLPLLGCACSSGCWGSGPTPLLAEPTFLCVSSRPHNPLSFLSVLPCSRGPGPSGLQGDGAGLPAHLGPLSCICLPSLLCDLGERQCPLWAVRSTQCLIAGKKVLQRLCP

SEQ ID NO: 1954 - protein, 116 aa, Homo sapiens; identical to SEQ ID NO: 1953

SEQ ID NO: 1955 - protein, 116 aa, Homo sapiens; identical to SEQ ID NO: 1953

SEQ ID NO: 1956 - protein, 82 aa, Homo sapiens
MAIPPFIMNTLEKKAFLKRFPWMSAPIQVGLVGFCLVFATPLCCALFPQKSSMSVTSLEAELQAKIQESHPELRRVYFNKGL

SEQ ID NO: 1957 - protein, 82 aa, Homo sapiens; identical to SEQ ID NO: 1956

SEQ ID NO: 1958 - protein, 18 aa, Homo sapiens
MRFSEAWTSPWCMTLLTC

SEQ ID NO: 1959 - protein, 18 aa, Homo sapiens
MRFSEAWTSPWCMTLLTC

SEQ ID NO: 1960 - protein, 43 aa, Homo sapiens
  SITE (8): Xaa equals any of the naturally occurring L-amino acids
MSMAMGSXTLLLGWGPGPGWDCGVMRVVLCWLPGGNCQGESST

SEQ ID NO: 1961 - protein, 79 aa, Homo sapiens [sequence omitted]

SEQ ID NO: 1962 - protein, 305 aa, Homo sapiens
MPANFTEGSFDSSGTGQTLDSSPVACTETVTFTEVVEGKEWGSFYYSFKTEQLITLWVLFVFTIVGNSVVLFSTWRRKKKSRMTFFVTQLAITEKQARVLIVIAWSLSFLFSIPTLIIFGKRTLSNGEVQCWALWPDDSYWTPYMTIVAFLVYFIPLTIISIMYGIVIRTIWIKSKTYETVISNCSDGKLCSSYNRGLISKAKIKAIKYSIIIILAFICCWSPYFLFDILDNFNLLPDTQERFYASVIIQNLPALNSAINPLIYCVFSSSISFPCREQRSQDSRMTFRERTERHEMQILSKPEFI

SEQ ID NO: 1963 - protein, 43 aa, Homo sapiens
MSMAMGSSTLLLGWGPGPGWDCGVMRVVLCWLPGGNCQGESST

SEQ ID NO: 1964 - protein, 161 aa, Homo sapiens
  SITE (104): Xaa equals any of the naturally occurring L-amino acids
MPTTLPSDLMLLWLGLPSLPSPVEEEGRLVKGLRLTLAAPASEVLPDWEDPPSHPTAWAQPRTHQPDTPNSIKSGIYSPCGGAVLRGAGAIVLRKEVCPSVRLXGRPGPKWGRKRGTARVKIPAYSGWEYVQGGGAQAGVGAGGPAAAAPTRGPPHLGPYL

SEQ ID NO: 1965 - protein, 161 aa, Homo sapiens [sequence omitted]

SEQ ID NO: 1966 - protein, 92 aa, Homo sapiens
  SITE (44): Xaa equals any of the naturally occurring L-amino acids
MGPFAPTLLMLLPPLLMLVLYGCWQARGWAGHQYEHHRGPGEQXAAYFQAMRFNANMSFHAQMVINEGEAFREGQRTIPAVERPGNALRQRS

SEQ ID NO: 1967 - protein, 92 aa, Homo sapiens
MGPFAPTLLMLLPPLLMLVLYGCWQARGWAGHQYEHHRGPGEQSAAYFQAMRFNANMSFHAQMVINEGEAFREGQRTIPAVERPGNALRQRS

SEQ ID NO: 1968 - protein, 124 aa, Homo sapiens
  SITE (20): Xaa equals any of the naturally occurring L-amino acids
MWPRLAFCCWGLALVSGWAXFQQMSPSRNFSFRLFPETAPGAPGSIPAPPAPGDEAAGSRVERLGQAFRRRVRLLRELNERLELASWWMIRPAWAKSTSAASSCSSASCCPTFPWWPRAPRGHS

SEQ ID NO: 1969 - protein, 230 aa, Homo sapiens
  SITE (20): Xaa equals any of the naturally occurring L-amino acids
  SITE (79): Xaa equals any of the naturally occurring L-amino acids
  SITE (165): Xaa equals any of the naturally occurring L-amino acids
MWPRLAFCCWGLALVSGWAXFQQMSPSRNFSFRLFPETAPGAPGSIPAPPAPGDEAAGSRVERLGQAFRRRVRLLRELXERLELVFLVDDSSSVGEVNFRSELMFVRKLLSDFPVVPTATRVAIVTFSSKNYVVPRVDYISTRRARQHKCALLLQEIPAISYRGXGTYTKGAFQQAAQILLHARENSTKVVFLITDGYSKGETLAQLQRHCEIQEWRSSLLAYGKGTFES

SEQ ID NO: 1970 - protein, 89 aa, Homo sapiens
MWPRLAFCCWGLALVSGWATFQQMSPSRNFSFRLFPETAPGAPGSIPAPPAPGDEAAGSRVERLGQAFRRRVRLLRELSRAPGACLPGG

SEQ ID NO: 1971 - protein, 99 aa, Homo sapiens
  SITE (6): Xaa equals any of the naturally occurring L-amino acids
  SITE (60): Xaa equals any of the naturally occurring L-amino acids
MHVKWXLIMFLICISLESNVNGYLFMCLLFGYLLWRNVYPNLLPILNFNSCLLDLELQEXFVYSKYQTFNKYMICKCFFSHAVCYSFTFLIVFFEAQTF

SEQ ID NO: 1972 - protein, 99 aa, Homo sapiens [sequence omitted]

SEQ ID NO: 1973 - protein, 153 aa, Homo sapiens
MHTHTLSLVSLSLSHSFLLSSQVTCTLGFLVEAHLPPLRGVPDCIHHNPKTRVGGNWREQNTDLILVSLLETSSPKARSLKTNLLKTCLLKVNDLMTNLPKAQFLFWCVYIHLGVLFFFVMLWIFQGFISIHPRVLLSYYQQHKFIKFAALCK

SEQ ID NO: 1974 - protein, 153 aa, Homo sapiens; identical to SEQ ID NO: 1973

SEQ ID NO: 1975 - protein, 129 aa, Homo sapiens
  SITE (99): Xaa equals any of the naturally occurring L-amino acids
  SITE (106): Xaa equals any of the naturally occurring L-amino acids
  SITE (121): Xaa equals any of the naturally occurring L-amino acids
  SITE (123): Xaa equals any of the naturally occurring L-amino acids
  SITE (127): Xaa equals any of the naturally occurring L-amino acids
MQAGKGLAQVWGVATFVQLCAHTVFLSMYLCMHICFAAISSKVRVRVNAPFCVSVPLKVHAPLSLGIKVGLQGQKHGRATGEAGMPQGEMLGKQEPQTXSSPKPTXRREVSRNELNPVIPXAXNPFXKK

SEQ ID NO: 1976 - protein, 467 aa, Homo sapiens
  SITE (151): Xaa equals any of the naturally occurring L-amino acids
  SITE (160): Xaa equals any of the naturally occurring L-amino acids
LGPAGLRRRTKRRKRGDNSTDTTQGDPLSIHHYFHGYLAGFSVRSGRLESREVIECLYACREGLDYRDFESLGKGMKVHVNPSQSLLTLEGDDVETFNHALQHVAYMNTLRFATPGVRPLRLTTAVKCFSEESCVSIPEVEGYVVVLQPDXPQILLSGTXHFARPAVDFEGTNGVPLFPDLQITCSISHQVEAKKDESWQGTVTDTRMSDEIVHNLDGCEISLVGDDLDPERESLLLDTTSLQQRGLELTNTSAYLTIAGVESITVYEEILRQARYRLRHGAALYTRKFRLSCSEMNGRYSSNEFIVEVNVLHSMNRVAHPSHVLSSQQFLHRGHQPPPEMAGHSLASSHRNSMIPSAATLIIVVCVGFLVLMVVLGLVRIHSLHRRVSGAGGPPGASSDPKDPDLFWDDSALTIIVNPMESYQNRQSCVTGAVGGQQEDEDSSDSEVADSPSSDERRIIETPPHRY

SEQ ID NO: 1977 - protein, 231 aa, Homo sapiens
  SITE (92): Xaa equals any of the naturally occurring L-amino acids
  SITE (113): Xaa equals any of the naturally occurring L-amino acids
  SITE (116): Xaa equals any of the naturally occurring L-amino acids
MQAGKGLAQVWGVATFVQLCAHTVFLSMYLCMHICFAAISSKVRVRVNAPFCVSVPLKVHAPLSLGIKVGLQGQKHGRATGEAGMPQGEMLXKQEPQTSSSPKPTRRREVSRXELXPVIPSAATLIIVVCVGFLVLMVVLGLVRIHSLHRRVSGAGGPPGASSDPKDPDLFWDDSALTIIVNPMESYQNRQSCVTGAVGGQQEDEDSSDSEVADSPSSDERRIIETPPHRY

SEQ ID NO: 1978 - protein, 145 aa, Homo sapiens
PFTFQHDCEASPATWNYLRRMTAGFMGMAVAIILFGWIIGVLGCCWDRGLMQYVAGLLFLMGGTFCIISLCTCVAGINFELSRYPRYLYGLPDDISHGYGWSMFCAWGGLGLTLISGFFCTLAPSVQPVPRTNYPKSRPENGTVC

SEQ ID NO: 1979 - protein, 125 aa, Homo sapiens
MTAGFMGMAVAIILFGWIIGVLGCCWDRGLMQYVAGLLFLMGGTFCIISLCTCVAGINFELSRYPRYLYGLPDDISHGYGWSMFCAWGGLGLTLISGFFCTLAPSVQPVPRTNYPKSRPENGTVC

SEQ ID NO: 1980 - protein, 146 aa, Homo sapiens
VPFTFQHDCEASPATWNYLRRMTAGFMGMAVAIILFGWIIGVLGCCWDRGLMQYVAGLLFLMGGTFCIISLCTCVAGINFELSRYPRYLYGLPDDISHGYGWSMFCAWGGLGLTLISGFFCTLAPSVQPVPRTNYPKSRPENGTVC

SEQ ID NO: 1981 - protein, 109 aa, Homo sapiens
  SITE (40): Xaa equals any of the naturally occurring L-amino acids
MCSMFCERLLLLCHCQLSIAVFMYWVHVTHLSSVRRINYXFLIYKKGMQLPSWYPSSCPASRKNQVTGMNGRVVNVEDFIEQWKWLSVGWGARKGLEWEDDLYLEFGHP

SEQ ID NO: 1982 - protein, 109 aa, Homo sapiens [sequence omitted]

SEQ ID NO: 1983 - protein, 109 aa, Homo sapiens; identical to SEQ ID NO: 1981
  SITE (40): Xaa equals any of the naturally occurring L-amino acids

SEQ ID NO: 1984 - protein, 108 aa, Homo sapiens
  SITE (29): Xaa equals any of the naturally occurring L-amino acids
  SITE (37): Xaa equals any of the naturally occurring L-amino acids
  SITE (99): Xaa equals any of the naturally occurring L-amino acids
GACRGSSEPGATPRPDGEPRPLPGLHCAXGMPTPLPXSPLGLRSLRRVGWPVRKGRVGRAWGWAGLCEELQPQAPPCHESKRGRGAVAHDCNPSTLGGXSGQITRSGV

SEQ ID NO: 1985 - protein, 130 aa, Homo sapiens
  SITE (37): Xaa equals any of the naturally occurring L-amino acids
MKKFSYAFLYFPSLNFTVSTWLCTALFLLHSHHLLAXCGSTFAQVCLVSESMSPFLGRLCRTSVPCAGATAFPADSDRHCNGFPAGAEVTNRPSPWRPLVLLIPLRLGLTDINEAYVETLKVGPAVRRLP

SEQ ID NO: 1986 - protein, 16 aa, Homo sapiens
PASQKAVSAWRCPAHV

SEQ ID NO: 1987 - protein, 130 aa, Homo sapiens [sequence omitted]

SEQ ID NO: 1988 - protein, 202 aa, Homo sapiens
  SITE (176): Xaa equals any of the naturally occurring L-amino acids
  SITE (181): Xaa equals any of the naturally occurring L-amino acids
  SITE (195): Xaa equals any of the naturally occurring L-amino acids
  SITE (200): Xaa equals any of the naturally occurring L-amino acids
MALSGGLRCCRRVLSWVPVLVIVLVVLWSYYAYVFELCLVTVLSPAEKVIYLILYHAIFVFFTWTYWKSIFTLPQQPNQKFHLSYTDKERYENEERPEVQKQMLVDMAKKLPVYTRTGSGAVRFCDRCHLIKPDRCHHCSVCAMCVLKMDHHCPWVNNCIGFSNYKFFLQFLAYSXLYCLXIATTVFSYFIKYWXGELPXVA

SEQ ID NO: 1989 - protein, 96 aa, Homo sapiens [sequence omitted]

SEQ ID NO: 1990 - protein, 331 aa, Homo sapiens
  SITE (176): Xaa equals any of the naturally occurring L-amino acids
MALSGGLRCCRRVLSWVPVLVIVLVVLWSYYAYVFELCLVTVLSPAEKVIYLILYHAIFVFFTWTYWKSIFTLPQQPNQKFHLSYTDKERYENEERPEVQKQMLVDMAKKLPVYTRTGSGAVRFCDRCHLIKPDRCHHCSVCAMCVLKMDHHCPWVNNCIGFSNYKFFLQFLAYSXLYCLYIATTVFSYFIKYWRGELPSVRSKFHVLFLLFVACMFFVSLVILFGYHCWLVSRNKTTLEAFCTPVFTSGPEKNGFNLGFIKNIQQVFGDKKKFWLIPIGSSPGDGHSFPMRSMNESQNPLLANEETWEDNEDDNQDYPEGSSSLAVETET

SEQ ID NO: 1991 - protein, 235 aa, Homo sapiens
  SITE (171): Xaa equals any of the naturally occurring L-amino acids
  SITE (205): Xaa equals any of the naturally occurring L-amino acids
  SITE (210): Xaa equals any of the naturally occurring L-amino acids
  SITE (221): Xaa equals any of the naturally occurring L-amino acids
MWGLLLALAAFAPAVGPALGAPRNSVLGLAQPGTTKVPGSTPALHSSPAQPPAETANGTSEQHVRIRVIKKKKVIMKKRKKLTLTRPTPLVTAGPLVTPTPAGTLDPAEKQETGCPPLGLESLRVSDSRLEASSSQSFGLGPHRGRLNIQSGLEDGDLYDGAWCAEEQDAXPWFQVDAGHPTRFLGGITQGKELLSGGEGRLTLXQEVQXGLGLGSPGGTXDLSSPFLAGMMGSH

SEQ ID NO: 1992 - protein, 197 aa, Homo sapiens
  SITE (169): Xaa equals any of the naturally occurring L-amino acids
  SITE (187): Xaa equals any of the naturally occurring L-amino acids
  SITE (194): Xaa equals any of the naturally occurring L-amino acids
MWGLLLALAAFAPAVGPALGAPRNSVLGLAQPGTTKVPGSTPALHSSPAQPPAETANGTSEQHVRIRVIKKKKVIMKKRKKLTLTRPTPLVTAGPLVTPTPAGTLDPAEKQETGCPPLGLESLRVSDSRLEASSSQSFGLGPHRGRLNIQSGLEDGDLYDGAWCAEEQXADPWFQVDAGHPTRFSGXITQGRNXVWR

SEQ ID NO: 1993 - protein, 197 aa, Homo sapiens
MWGLLLALAAFAPAVGPALGAPRNSVLGLAQPGTTKVPGSTPALHSSPAQPPAETANGTSEQHVRIRVIKKKKVIMKKRKKLTLTRPTPLVTAGPLVTPTPAGTLDPAEKQETGCPPLGLESLRVSDSRLEASSSQSFGLGPHRGRLNIQSGLEDGDLYDGAWCAEEQDADPWFQVDAGHPTRFSGVITQGRNSVWR

SEQ ID NO: 1994 - protein, 241 aa, Homo sapiens
  SITE (229): Xaa equals any of the naturally occurring L-amino acids
  SITE (230): Xaa equals any of the naturally occurring L-amino acids
  SITE (236): Xaa equals any of the naturally occurring L-amino acids
MALRLLRRAARGAAAAALLRLKASLAADIPRLGYSSSSHHKYIPRRAVLYVPGNDEKKIKKIPSLNVDCAVLDCEDGVAANKKNEARLRIVKTLEDIDLGPTEKCVRVNSVSSGLAEEDLETLLQSRVLPSSLMLPKVESPEEIQWFADKFSFHLKGRKLEQPMNLIPFVETAMGLLNFKAVCEETLKVGPQVGLFLDAVVFGGEDFRASIGATSSKETLGYSLRPAKXXCHSETXWVSKP

SEQ ID NO: 1995 - protein, 340 aa, Homo sapiens
MALRLLRRAARGAAAAALLRLKASLAADIPRLGYSSSSHHKYIPRRAVLYVPGNDEKKIKKIPSLNVDCAVLDCEDGVAANKKNEARLRIVKTLEDIDLGPTEKCVRVNSVSSGLAEEDLETLLQSRVLPSSLMLPKVESPEEIQWFADKFSFHLKGRKLEQPMNLIPFVETAMGLLNFKAVCEETLKVGPQVGLFLDAVVFGGEDFRASIGATSSKETLDILYARQKIVVIAKAFGLQAVDLVYIDFRDGAGLLRQSREGAAMGFTGKQVIHPNQIAVVQEQFSPSPEKIKWAEELIAAFKEHQQLGKGAFTFQGSMIDMPLLKQAQNTVTLATSIKEK

SEQ ID NO: 1996 - protein, 85 aa, Homo sapiens [sequence omitted]

SEQ ID NO: 1997 - protein, 95 aa, Homo sapiens
MAPPPACRSPMSPPPPLLLLLLLSLALLGARARAEPAGSAVPAQSRPCVDCHAFEFMQRALQDLRKTACSLDARTETLLLQAERRALCACWPAGH

SEQ ID NO: 1998 - protein, 84 aa, Homo sapiens
  SITE (76): Xaa equals any of the naturally occurring L-amino acids
  SITE (78): Xaa equals any of the naturally occurring L-amino acids
  SITE (79): Xaa equals any of the naturally occurring L-amino acids
  SITE (80): Xaa equals any of the naturally occurring L-amino acids
  SITE (84): Xaa equals any of the naturally occurring L-amino acids
MLCMQTVMPQHTYLQHLVFGFCLLILCINLSVLAHRYTLCYFSMTGEYSIINGQLLVYLSNLSAQWKYRYFQTLLXLXXXGVVX

SEQ ID NO: 1999 - protein, 105 aa, Homo sapiens
MLCMQTVMPQHTYLQHLVFGFCLLILCINLSVLAHRYTLCYFSMTGEYSIINGQLLVYLSNLSAQWKYRYFQTLLVLKKKKKKKKKKKKKKKKKKKKKKKKKKKK

SEQ ID NO: 2000 - protein, 108 aa, Homo sapiens
  SITE (76): Xaa equals any of the naturally occurring L-amino acids
  SITE (106): Xaa equals any of the naturally occurring L-amino acids
MLCMQTVMPQHTYLQHLVFGFCLLILCINLSVLAHRYTLCYFSMTGEYSIINGQLLVYLSNLSAQWKYRYFQTLLXLKKKKKKKKKKKKKKKKKKKKKKKKKKKKXKK

SEQ ID NO: 2001 - protein, 75 aa, Homo sapiens
  SITE (62): Xaa equals any of the naturally occurring L-amino acids
MPLAPSPVMLILVILLLFCPSFQFLPISFYSFNVYAFAFSGISPPSCLHGWLHFIQSSFFLXYSDNILVSPSLYL

SEQ ID NO: 2002 - protein, 75 aa, Homo sapiens
MPLAPSPVMLILVILLLFCPSFQFLPISFYSFNVYAFAFSGISPPSCLHGWLHFIQSSFFLLYSDNILFSPSLYL

SEQ ID NO: 2003 - protein, 147 aa, Homo sapiens
  SITE (119): Xaa equals any of the naturally occurring L-amino acids
MWLWVWLIHTLHSGLQKPRERSLPEATFQNLLHPPTDLPSPCPLFESRCQVLPADTWLLEGRCSFHLTMQACFAVGRAVLSSSQLHTGITWRVQKLPASVKEHQCISTANIPNARLDSXQLPGPPGFSSFQELSDPGSSLNVGYKLT

SEQ ID NO: 2004 - protein, 147 aa, Homo sapiens
MWLWVWLIHTLHSGLQKPRERSLPEATFQNLLHPPTDLPSPCPLFESRCQVLPADTWLLEGRCSFHLTMQACFAVGRAVLSSSQLHTGITWRVQKLPASVKEHQCISTANIPNARLDSLQLPGPPGFSSFQELSDPGSSLNVGYKLT

SEQ ID NO: 2005 - protein, 147 aa, Homo sapiens; identical to SEQ ID NO: 2004

SEQ ID NO: 2006 - protein, 127 aa, Homo sapiens
QGYFRMDSSATQFHIETHENTSGLWSIWYRNHFDRSVVLNDVFLSKETKHMLKILNFTGPLFLPPGCWNIFSLKLAVKDIAINLFTNVFLTTNIGAIFAIPLQISHCLETRVTVGMCENNWIFKQCE

SEQ ID NO: 2007 - protein, 221 aa, Homo sapiens
  SITE (25): Xaa equals any of the naturally occurring L-amino acids
  SITE (26): Xaa equals any of the naturally occurring L-amino acids
  SITE (34): Xaa equals any of the naturally occurring L-amino acids
KGTPAGTGPEFPGRPTRPGDLWPTXXVCVTSSLXCTLENGVPCVIQESAPVHNSFIDWSATCEGQFSSAYCPLELNDYNAFPEENMNYANGFPCPADVQTDFIDHNSQSTWNTPPNMPAAWGHASFISSPPYLTSTRSLSPMSGLFGSIWAPQSDVYENCCPINPTTEHSTHMENQAVVCKEYYPGFNPFRAYMNLDIWTTTANRNANFPLSRDSSYCGNV

SEQ ID NO: 2008 - protein, 166 aa, Homo sapiens
MAGLRRPQPGCYCRTAAAVNLLLGVFQVLLPCCRPGGAQGQAIEPLPNVVELWQAEEGELLLPTQGDSEEGLEEPSQEQSFSDKLFSGKGLHFQPSVLDFGIQFLGHPVAKILHAYNPSRDSEVVVNSVFAAAGHFHVPPVPCRVIPAMGKTSSELFSYLTEEGSI

SEQ ID NO: 2009 - protein, 19 aa, Homo sapiens
IPCTRPLGFPCGSNVPWWG

SEQ ID NO: 2010 - protein, 511 aa, Homo sapiens
  SITE (171): Xaa equals any of the naturally occurring L-amino acids
  SITE (358): Xaa equals any of the naturally occurring L-amino acids
  SITE (388): Xaa equals any of the naturally occurring L-amino acids
MAGLRRPQPGCYCRTAAAVNLLLGVFQVLLPCCRPGGAQGQAIEPLPNVVELWQAEEGELLLPTQGDSEEGLEEPSQEQSFSDKLFSGKGLHFQPSVLDFGIQFLGHPVAKILHAYNPSRDSEVVVNSVFAAAGHFHVPPVPCRVIPAMGKTSFRIIFLPTEEGSIESSLXINTSSYGVLSYHVSGIGTRRISTEGSAKQLPNAYFLLPKVQSIQLSQMQAETTNTSLLQVQLECSLHNKVCQQLKGCYLESDDVLRLQMSIMVTMENFSKEFEENTQHLLDHLSIVYVATDESETSDDSAVNMYILHSGNSLIWIQDIRHFSQRDALSLQFEPVLLPTSTTNFTKIASFTCKAATSXDSGIIEDVKKTTHTPTLKACLFSSVAQGYXRMDSSATQFHIETHENTSGLWSIWYRNHFDRSVVLNDVFLSKETKHMLKILNFTGPLFLPPGCWNIFSLKLAVKDIAINLFTNVFLTTNIGAIFAIPLQISHCLETRVTVGMCENNWIFKQCE

SEQ ID NO: 2011 - protein, 317 aa, Homo sapiens [sequence omitted]

SEQ ID NO: 2012 - protein, 957 aa, Homo sapiens [sequence omitted]

SEQ ID NO: 2013 - protein, 57 aa, Homo sapiens
MWWEDLMKGLFCLWPLVRSVSSLMTSSTSCPSPPTLPPWRPCLPRLRMRVLVLLIWS

SEQ ID NO: 2014 - protein, 57 aa, Homo sapiens; identical to SEQ ID NO: 2013

SEQ ID NO: 2015 - protein, 75 aa, Homo sapiens [sequence omitted]

SEQ ID NO: 2016 - protein, 42 aa, Homo sapiens
MRLSKSNQVQLFLYFLLQWSLGSVNAETSLQILLACSFTTDS

SEQ ID NO: 2017 - protein, 169 aa, Homo sapiens
MWAVLRLALRPCARASPAGPRAYHGDSVASLGTQPDLGSALYQENYKQMKALVNQLHERVEHIKLGGGEKARALHISRGKLLPRERIDNLIDPGSPFLELSQFAGYQLYDNEEVPGGGIITGIGRVSGVECMIIANDATVKGGAYYPVTVKKQLRAQEIAMQTGSPAST

SEQ ID NO: 2018 - protein, 45 aa, Homo sapiens
MVKHFTLWMVCLSLVFRKLLSLLPKKKEGQVNFFNQKKITHFIKP

SEQ ID NO: 2019 - protein, 388 aa, Homo sapiens; identical to SEQ ID NO: 1468

SEQ ID NO: 2020 - protein, 554 aa, Homo sapiens
MGPRFTMLLAMWLVCGSEPHPHATIRGSHGGRKVPLVSPDSSRPARFLRHTGRSRGIERSTLEEPNLQPLQRRRSVPVLRLARPTEPPARSDINGAAVRPEQRPAARGSPREMIRDEGSSARSRMLRFPSGSSSPNILASFAGKNRVWVISAPHASEGYYRLMMSLLKDDVYCELAERHIQQIVLFHQAGEEGGKVRRITSEGQILEQPLDPSLIPKLMSFLKLEKGKFGMVLLKKTLQVEERYPYPVRLEAMYEVIDQGPIRRIEKIRQKGFVQKCKASGVEGQVVAEGNDGGGGAGRPSQGSEKKKEDPRRAQVPPTRESRVKVLRKLAATAPAFPQPPSTPRATTLTPAPATTVTRSTSRAGNRCCKTYDHHWLSHHAEALDPLTLPTGPLQPLRVITARRPSVSRESLPSIPGRISTGRGHRQPGGPARPTSLESFTNAPPTTISEPSTRAAGPGRFRDNRMDRREHGHRDPNVVPGPPKPAKEKPPKKKAQDKILSNEYEEKYDLSRPTASQLEDELQVGNVPLKKAKESKKHEKLEKPEKEKKKKKKK

SEQ ID NO: 2021 - protein, 509 aa, Homo sapiens; identical to SEQ ID NO: 321

SEQ ID NO: 2022 - protein, 264 aa, Homo sapiens
MCLLGALVLLGLGVLLFSGGLSESETGPMEEVERQVLPDPEVLEAVGDRQDGLREQLQAPVPPDSVPSLQNMGLLLDKLAKENQDIRLLQAQLQAQKEELQSLMHQPKGLEEENAQLRGALQQGEAFQRALESELQQLRARLQGLEADCVRGPDGVCLSGGRGPQGDKAIREQGPREQEPELSFLKQKEQLEAEAQALSLEEVAVQQTGDDDEVDDFEDFIFSHFFGDKALKKRSGKKDKHSQSPRAAGPREGHSHSHHHHHRG

SEQ ID NO: 2023 - protein, 123 aa, Homo sapiens [sequence omitted]

SEQ ID NO: 2024 - protein, 57 aa, Homo sapiens
MNCVEWWKSVFLFVVLLFVTSVSCLGVVGVAVEGSLQSCSFYSLCNKRLEHVKGIFK

SEQ ID NO: 2025 - protein, 57 aa, Homo sapiens; identical to SEQ ID NO: 2024

SEQ ID NO: 2026 - protein, 92 aa, Homo sapiens
  SITE (29): Xaa equals any of the naturally occurring L-amino acids
MEIRTRVVWLCLCLCLCLCLCLSLFSLPXSLSPLPSPLSLSVSLSLSFHGLPLMPSRSWTVLLPSQLTATSLPDSPASACRVPAIAGARHHA

SEQ ID NO: 2027 - protein, 82 aa, Homo sapiens
MNRSTRSYRCWATWPRLGWALPCCMNSLRKGRKFSQITTSLMASVSSASMVSRRRRPLPKHPVTTTSTATALLGTSSTWSKS

SEQ ID NO: 2028 - protein, 46 aa, Homo sapiens
MVTASLLLLPAVMAIVFPITWAVQSQSWAAEFNGACFQVLHGKLYS

SEQ ID NO: 2029 - protein, 176 aa, Homo sapiens
MSRGDNCTDLLALGIPSITQAWGLWVLLGAVTLLFLISLAAHLSQWTRGRSRSHPGQGRSGESVEEVPLYGNLHYLQTGRLSQDPEPDQQDPTLGGPARAAEEVMCYTSLQLRPPQGRIPGPGTPVKYSEVVLDSEPKSQASGPEPELYASVCAQTRRARASFPDQAYANSQPAAS

SEQ ID NO: 2030 - protein, 168 aa, Homo sapiens
  SITE (83): Xaa equals any of the naturally occurring L-amino acids
MPLLRGLLWLQVLCAGPLHTEAVVLLVPSDDGRAFLLRSRLLHPEAHVPPAADRGASLQCVLHQAAPKSRPRSPAAGAALLHXPRRTGDEPCREFHGNGFPGPTQLTPGECGLPAPSSLLQHASAPVRTGSEGQVVGCPRARGETGEGLSLAFLSSLMFTSRNGLVGC

SEQ ID NO: 2031 - protein, 135 aa, Homo sapiens
  SITE (118): Xaa equals any of the naturally occurring L-amino acids
  SITE (121): Xaa equals any of the naturally occurring L-amino acids
MPLLRGLLWLQVLCAGPLHTEAVVLLVPSDDGRAFLLRSRLLHPEAHVPPAADRGASLQCVLHQAAPKSRPRSPAAGAALLHRPRRTGDEPCREFHGNGFPGPTQLTPGECGLPAPSXLLXHASAPVRTVCALTW

SEQ ID NO: 2032 - protein, 168 aa, Homo sapiens
  SITE (39): Xaa equals any of the naturally occurring L-amino acids
MPLLRGLLWLQVLCAGPLHTEAVVLLVPSDDGRAFLLRXRLLHPEAHVPPAADRGASLQCVLHQAAPKSRPRSPAAGAALLHRPRRTGDEPCREFHGNGFPGPTQLTPGECGLPAPSSLLQHASAPVRTGSEGQVVGCPRARGETGEGLSLAFLSSLMFTSRNGLVGC

SEQ ID NO: 2033 - protein, 134 aa, Homo sapiens
  SITE (39): Xaa equals any of the naturally occurring L-amino acids
MPLLRGLLWLQVLCAGPLHTEAVVLLVPSDDGRAFLLRXGFFIRRRMYPPPLIEEPAFNVSYTRQPPNPGPGAQQPGPPYYTDPGGPGMNPVGNSMAMAFQVPPNSPQGSVACPPPPAYCNTPPPPYEQVVKAK

SEQ ID NO: 2034 - protein, 168 aa, Homo sapiens; identical to SEQ ID NO: 2032
  SITE (39): Xaa equals any of the naturally occurring L-amino acids

SEQ ID NO: 2035 - protein, 134 aa, Homo sapiens; identical to SEQ ID NO: 2033
  SITE (39): Xaa equals any of the naturally occurring L-amino acids

SEQ ID NO: 2036 - protein, 468 aa, Homo sapiens
MGRGWGFLFGLLGAVWLLSSGHGEEQPPETAAQRCFCQVSGYLDDCTCDVETIDRFNNYRLFPRLQKLLESDYFRYYKVNLKRPCPFWNDISQCGRRDCAVKPCQSDEVPDGIKSASYKYSEEANNLIEECEQAERLGAVDESLSEETQKAVLQWTKHDDSSDNFCEADDIQSPEAEYVDLLLNPERYTGYKGPDAWKIWNVIYEENCFKPQTIKRPLNPLASGQGTSEENTFYSWLEGLCVEKRAFYRLISGLHASINVHLSARYLLQETWLEKKWGHNITEFQQRFDGILTEGEGPRRLKNLYFLYLIELRALSKVLPFFERPDFQLFTGNKIQDEENKMLLLEILHEIKSFPLHFDENSFFAGDKKEAHKLKEDFRLHFRNISRIMDCVGCFKCRLWGKLQTQGLGTALKILFSEKLIANMPESGPSYEFHLTRQEIVSLFNAFGRISTSVKELENFRNLLQNIH

SEQ ID NO: 2037 - protein, 314 aa, Homo sapiens
  SITE (227): Xaa equals any of the naturally occurring L-amino acids
MLLAQGLILHFLGRAWTWPDALNIENSDSESWTSHTVKKFTASFEASLSGEREFKTPTISLKETIGKYSDDHEMRNEVYHRKIISWFGDSPLALFGLHQLIEYGKKSGKKAGDWYGPAVVAHILRKAVEEARHPDLQGITIYVAQDCTVPVRLGGERTNTDYLEFVKGILSLEYCVGIIGGKPKQSYYFAGFQDDSLIYMDPHYCQSFVDVSIKDFPLETFHCPSPXKMSFRKMDPSCTIGFYCRNVQDFKRASEEITKMLKFSSKEKYPLFTFVNGHSRDYDFTSTTTNEEDLFSEDEKKQLKRFSTEEFVLL

SEQ ID NO: 2038 - protein, 56 aa, Homo sapiens
MRWLFVLMLSLPLPPTPRQGPACDVPLPVSHVFSLFNSHLGARTCGVWFSLPVSVC

SEQ ID NO: 2039 - protein, 414 aa, Homo sapiens [sequence omitted]

SEQ ID NO: 2040 - protein, 200 aa, Homo sapiens
MASSLTCTGVIWALLSFLCAATSCVGFFMPYWLWGSQLGKPVSFGTFRRCSYPVHDESRQMMVMVEECGRYASFQGIPSAEWRICTIVTGLGCGLLLLVALTALMGCCVSDLISRTVGRVAGGIQFLGGLLIGAGCALYPLGWDSEEVRQTCGYTSGQFDLGKCEIGWAYYCTGAGATAAMLLCTWLACFSGKKQKHYPY

SEQ ID NO: 2041 - protein, 249 aa, Homo sapiens
MIGMSTKAVLWRCFSTVVIFLFLLDEQTSLLVLVPAGVGAAIELWKVKKALKMTIFWRGLMPEFQFGTYSESERKTEEYDTQAMKYLSYLLYPLCVGGAVYSLLNIKYKSWYSWLINSFVNGVYAFGFLFMLPQLFVNYKVRRCVLPAARPPSPVLPTADLGLSLLFQLKSVAHLPWKAFTYKAFNTFIDDVFAFIITMPTSHRLACFRDDVVFLVYLYQRWLYPVDKRRVNEFGESYEEKATRAPHTD

SEQ ID NO: 2042 - protein, 249 aa, Homo sapiens; identical to SEQ ID NO: 2041

SEQ ID NO: 2043 - protein, 60 aa, Homo sapiens
MSPTGLLVVFAPVVLGLKAITLAALLLALATSRRSPGQEDVKTTGPAGAMNTLAWSKGQE

SEQ ID NO: 2044 - protein, 60 aa, Homo sapiens; identical to SEQ ID NO: 2043

SEQ ID NO: 2045 - protein, 310 aa, Homo sapiens
MALRRPPRLRLCARLPDFFLLLLFRGCLIGAVNLKSSNRTPVVQEFESVELSCIITDSQTSDPRIEWKKIQDEQTTYVFFDNKIQGDLAGRAEILGKTSLKIWNVTRRDSALYRCEVVARNDRKEIDEIVIELTVQVKPVTPVCRVPKAVPVGKMATLHCQESEGHPRPHYSWYRNDVPLPTDSRANPRFRNSSFHLNSETGTLVFTAVHKDDSGQYYCIASNDAGSARCEEQEMEVYDLNIGGIIGGVLVVLAVLALITLGICCAYRRGYFINNKQDGESYKNPGKPDGVNYIRTDEEGDFRHKSSFVI

SEQ ID NO: 2046 - protein, 310 aa, Homo sapiens; identical to SEQ ID NO: 2045

SEQ ID NO: 2047 - protein, 310 aa, Homo sapiens; identical to SEQ ID NO: 2045

SEQ ID NO: 2048 - protein, 148 aa, Homo sapiens
MHMLNGALLALLFPVVNTRLLPFELEIYYIQHVMLYVVPIYLLWKGGAYTPEPLSSFRWALLSTGLMFFYHFSVLQILGLVTEVNLNNMLCPAISDPFYGPWYRIWASGHQTLMTMTHGKLVILFSYMAGPLCKYLLDLLRLPAKKID

SEQ ID NO: 2049 - protein, 413 aa, Homo sapiens
MLKALFLTMLTLALVKSQDTEETITYTQCTDGYEWDPVRQQCKDIDECDIVPDACKGGMKCVNHYGGYLCLPKTAQIIVNNEQPQQETQPAEGTSGATTGVVAASSMATSGVLPGGGFVASAAAVAGPEMQTGRNNFVIRRNPADPQRIPSNPSHRIQCAAGYEQSEHNVCQDIDECTAGTHNCRADQVCINLRGSFACQCPPGYQKRGEQCVDIDECRTSSYLCQYQCVNEPGKFSCMCPQGYQVVRSRTCQDINECETTNECREDEMCWNYHGGFRCYPRNPCQDPYILTPENRCVCPVSNAMCRELPQSIVYKYMSIRSDRSVPSDIFQIQATTIYANTINTFRIKSGNENGEFYLRQTSPVSAMLVLVKSLSGPREHIVDLEMLTVSSIGTFRTSSVLRLTIIVGPFSF

SEQ ID NO: 2050 - protein, 683 aa, Homo sapiens
MLFIFNFLFSPLPTPALICILTFGAAIFLWLITRPQPVLPLLDLNNQSVGIEGGARKGVSQKNNDLTSCCFSDAKTMYEVFQRGLAVSDNGPCLGYRKPNQPYRWLSYKQVSDRAEYLGSCLLHKGYKSSPDQFVGIFAQNRPEWIISELACYTYSMVAVPLYDTLGPEAIVHIVNKADIAMVICDTPQKALVLIGNVEKGFTPSLKVIILMDPFDDDLKQRGEKSGIEILSLYDAENLGKEHFRKPVPPSPEDLSVICFTSGTTGDPKGAMITHQNIVSNAAAFLKCVEHAYEPTPDDVAISYLPLAHMFERIVQAVVYSCGARVGFFQGDIRLLADDMKTLKPTLFPAVPRLLNRIYDKVQNEAKTPLKKFLLKLAVSSKFKELQKGIIRHDSFWDKLIFAKIQDSLGGRVRVIVTGAAPMSTSVMTFFRAAMGCQVYEAYGQTECTGGCTFTLPGDWTSGHVGVPLACNYVKLEDVADMNYFTVNNEGEVCIKGTNVFKGYLKDPEKTQEALDSDGWLHTGDIGRWLPNGTLKIIDRKKNIFKLAQGEYIAPEKIENIYNRSQPVLQIFVHGESLRSSLVGVVVPDTDVLPSFAAKLGVKGSFEELCQNQVVREAILEDLQKIGKESGLKTFEQVKAIFLHPEPFSIENGLLTPTLKAKRGELSKYFRTQIDSLYEHIQD

SEQ ID NO: 2051 - protein, 298 aa, Homo sapiens
MAPSGPGSSARRRCRRVLYWIPVVFITLLLGWSYYAYAIQLCIVSMENTGEQVVCLMAYHLLFAMFVWSYWKTIFTLPMNPSKEFHLSYAEKDLLEREPRGEAHQEVLRRAAKDLPIYTRTMSGAIRYCDRCQLIKPDRCHHCSVCDKCILKMDHHCPWVNNCVGFSNYKFFLLFLAYSLLYCLFIAATDLQYFIKFWTNGLPDTQAKFHIMFLFFAAAMFSVSLSSLFGYHCWLVSKNKSTLEAFRSPVFRHGTDKNGFSLGFSKNMRQVFGDEKKYWLLPIFSSLGDGCSFPTLPC

SEQ ID NO: 2052 - protein, 286 aa, Homo sapiens
MAPSGPGSSARRRCRRVLYWIPVVFITLLLGWSYYAYAIQLCIVSMENTGEQVVCLMAYHLLFAMFVWSYWKTIFTLPMNPSKEFHLSYAEKDLLEREPRGEAHQEVLRRAAKDLPIYTRTMSGAIRYCDRCQLIKPDRCHHCSVCDKCILKMDHHCPWVNNCVGFSNYKFFLLFLAYSLLYCLFIAATDLQYFIKFWTNGLPDTQAKFHIMFLFFAAAMFSVSLSSLFGYHCWLVSKNKSTLEAFRSPVFRHGTDKNGFSLGFSKNMRQVLVMRRSTGCYPFFQV

SEQ ID NO: 2053 - protein, 47 aa, Homo sapiens
MSHGSQPFLLLLSLHILILAGSFLLFSPYTAKPSFSSSFIVFPRAEM

SEQ ID NO: 2054 - protein, 914 aa, Homo sapiens [sequence omitted]

SEQ ID NO: 2055 - protein, 83 aa, Homo sapiens
MASCGLTGASLPPCCCSSFLAALKSMFWGLGSLLWSLVGILSPISSCFCVYTCLTPGSSSLFPRAVTQKLEQSVPTKALWGWM

SEQ ID NO: 2056 - protein, 68 aa, Homo sapiens
MATVGLSWKKELVILLVGPGAAALQPTHTCCSLPSLSSLFPLRLNTKTSPKTTRTNLYLLSIAPLSHL

SEQ ID NO: 2057 - protein, 73 aa, Homo sapiens
MELLKCSWQLFFSFLTHCSASTIVWLFVQHRLSQSHNKPFFGILQRCHSWHLNRESFVPNQSFSIYESCSIRK

SEQ ID NO: 2058 - protein, 85 aa, Homo sapiens
MQVFFLSEIGMLWVVVKMAHSAMLVSHTQDPTPSRWPCSLAQSILLTCSPQHRFSLERKIQLPPRRWWAEGREGCWVRERVGERT

SEQ ID NO: 2059 - protein, 51 aa, Homo sapiens
MLTLTHFVSYDYFIVKRLVGWLVGWLVCFVLVSPFIHSLSTNYNFLCFMCG

SEQ ID NO: 2060 - protein, 354 aa, Homo sapiens
MAPAKATNVVRLLLGSTALWLSQLGSGTVAASKSVTAHLAAKWPETPLLLEASEFMAEESNEKFWQFLETVQELAIYKQTESDYSYYNLILKKAGQFLDNLHINLLKFAFSIRAYSPAIQMFQQIAADEPPPDGCNAFVVIHKKHTCKINEIKKLLKKAASRTRPYLFKGDHKFPTNKENLPVVILYAEMGTRTFSAFHKVLSEKAQNEEILYVLRHYIQKPSSRKMYLSGYGVELAIKSTEYKALDDTQVKTVTNTTVEDETETNEVQGFLFGKLKEIYSDLRDNLTAFQKYLIESNKQMMPLKVWELQDLSFQAASQIMSAPVYDAIKLMKDISQNFPIKARVQMIGNVLIG

SEQ ID NO: 2061 - protein, 157 aa, Homo sapiens
MQAPRAALVFALVIALVPVGRGNYEELENSGDTTVESERPNKVTIPSTFAAVTIKETLNANINSTNFAPDENQLEFILMVLIPLILLVLLLLSVVFLATYYKRKRTKQEPSSQGSQSALQTCEYYPKTCLQVGVGLEKEQRCFKIKQQGLHIIVSDK

SEQ ID NO: 2062 - protein, 67 aa, Homo sapiens
MVLGFVLLLFNMGGTFSDGRKERRRTTFLRCCDFIMKPSPALILVTSVGPVLLQNASWVSVCRTLLS

SEQ ID NO: 2063 - protein, 43 aa, Homo sapiens
MYFFFFLTFLALWVMGTTAMASPFFMGYQLQYGPQCCSGHFND

SEQ ID NO: 2064 - protein, 57 aa, Homo sapiens
MCEGWLHPIFLYCCFWTTTPSCSAFGILDLHQQHPIPTPSSWFSGLCPWTELHHCLR

SEQ ID NO: 2065 - protein, 51 aa, Homo sapiens
MIICLIMFYFIALAGAHKRVVIQLREQLSLESRDKCYLIQKLTEAQRDMRN

SEQ ID NO: 2066 - protein, 366 aa, Homo sapiens
MACLKTQRAPKAFLLLPLLLYFAGLSKLTQLQVCSGTDEDPDDKNAPFRQRPFCKYKGHTADLLDLSWSKNYFLLSSSMDKTVRLWHISRRECLCCFQHIDFVTAIAFHPRDDRYFLSGSLDGKLRLWNIPDKKVALWNEVDGQTKLITAANFCQNGKYAVIGTYDGRCIFYDTEHLKYHTQIHVRSTRGRNKVGRKITGIEPLPGENKILVTSNDSRIRLYDLRDLSLSMKYKGYVNSSSQIKASFSHDFTYLVSGSEDKYVYIWSTYHDLSKFTSVRRDRNDFWEGIKAHNAVVTSAIFAPNPSLMLSLDVQSEKSEGNEKSEDAEVLDATPSGIMKTDNTEVLLSADFTGAIKVFVNKRKNVS

SEQ ID NO: 2067 - protein, 187 aa, Homo sapiens
MVAATVAAAWLLLWAAACAQQEQDFYDFKAVNIRGKLVSLEKYRGSVSLVVNVASECGFTDQHYRALQQLQRDLGPHHFNVLAFPCNQFGQQEPDSNKEIESFARRTYSVSFPMFSKIAVTGTGAHPAFKYLAQTSGKEPTWNFWKYLVAPDGKVVGAWDPTVSVEEVRPQITALVRKLILLKREDL

SEQ ID NO: 2068 - protein, 346 aa, Homo sapiens [sequence omitted]

SEQ ID NO: 2069 - protein, 47 aa, Homo sapiens
MRLSRAAHNLQTILYSVFCLCLHVAMMDRSPSSILALWRSGSCSVEI

SEQ ID NO: 2070 - protein, 102 aa, Homo sapiens
MLLHWLLQNELQSAVASCLVSISLGKEDFLQTGCKVKSHVGVIHRREKGGAIYLPNSLVLPTSHWIRLSYRNRHRGFILWTLMSTWEARCHGPCVMFDFNQK

SEQ ID NO: 2071 - protein, 144 aa, Homo sapiens
  SITE (138): Xaa equals any of the naturally occurring L-amino acids
MVTLAELLVLLAALLATVSGYFVSIDAHAEECFFERVTSGTKMGLIFEVAEGGFLDIDVEVRASCPQLRLGRVATRGLVAPGTGAGPVWGVGLEVAVRVLEKPRPPPPAPPRPRRPPNGPFSRDLPGFRDPLGAPSAXLVALGF

SEQ ID NO: 2072 - protein, 12 aa, Homo sapiens
MGSSLAFILFLP

SEQ ID NO: 2073 - protein, 201 aa, Homo sapiens
MVTLAELLVLLAALLATVSGYFVSIDAHAEECFFERVTSGTKMGLIFEVAEGGFLDIDVEITGPDNKGIYKGDRESSGKYTFAAHMDGTYKFCFSNRMSTMTPKIVMFTIDIGEAPKGQDMETEAHQNKLEEMINELAVAMTAVKHEQEYMEVRERIHRAINDNTNSRVVLWSFFEALVLVAMTLGQIYYLKRFFEVRRVV

SEQ ID NO: 2074 - protein, 45 aa, Homo sapiens
MLSASIWLVLIISRGNARQKVKLCFLLMLLATWKRRRGRGKRGRS

SEQ ID NO: 2075 - protein, 201 aa, Homo sapiens; identical to SEQ ID NO: 2073

SEQ ID NO: 2076 - protein, 201 aa, Homo sapiens; identical to SEQ ID NO: 2073

SEQ ID NO: 2077 - protein, 587 aa, Homo sapiens
MWRLGCLIWEVFNGPLPRAAALRNPGKIPKTLVPHYCELVGANPKVRPNPARFLQNCRAPGGFMSNRFVETNLFLEEIQIKEPAEKQKFFQELSKSLDAFPEDFCRHKVLPQLLTAFEFGNAGAVVLTPLFKVGKFLSAEEYQQKIIPVVVKMFSSTDRAMRIRLLQQMEQFIQYLDEPTVNTQIFPHVVHGFLDTNPAIREQTVKSMLLLAPKLNEANLNVELMKHFARLQAKDEQGPIRCNTTVCLGKIGSYLSASTRHRVLTSAFSRATRDPFAPSRVAGVLGFAATHNLYSMNDCAQKILPVLCGLTVDPEKSVRDQAFKAIRSFLSKLESVSEDPTQLEEVEKDVHAASSPGMGGAAASWAGWAVTGVSSLTSKLIRSHPTTAPTETNIPQRPTPEGHWETQEEDKDTAEDSSTADRWDDEDWGSLEQEAESVLAQQDDWSTGGQVSRASQVSNSDHKSSKSPESDWSSWEAEGSWEQGWQEPSSQEPPPDGTRLASEYNWGGPESSDKGDPFATLSARPSTQPRPDSWGEDNWEGLETDSRQVKAELARKKREERRREMEAKRAERKVAKGPMKLGARKLD

SEQ ID NO: 2078 - protein, 124 aa, Homo sapiens
MRQVAPARRAQLEHSGLHASLCLLSLLSLLPTLEANMSGFHQAPLTLLPSCTQGDGEARGHHTQPSFWRTEMKCPVEALLEHLATRAVVGRNGDHGAQQEHRTASEGQQQPLAESSPWWQPPHG

SEQ ID NO: 2079 - protein, 74 aa, Homo sapiens [sequence omitted]

SEQ ID NO: 2080 - protein, 76 aa, Homo sapiens
MVVDLFFYLLCIFLVLWVLEAMIKHLMYSDMSALIASFSSFLNCIHYFQNRYRYSVPPFELLACSCFPLSPKQGFF

SEQ ID NO: 2081 - protein, 146 aa, Homo sapiens
MAALLLLPLLLLLPLLLLKLHLWPQLRWLPAATAARGALEKASGQRREPEMQRPEAARSLPEGTVPPEVEEPPPLCHLEQLWRCSSPLAQSFCGSGSGWPRPACALPLCPPPCAGAPCCTASAAAARARWCWRQSFWSPWSRTCPP

SEQ ID NO: 2082 - protein, 30 aa, Homo sapiens
  SITE (28): Xaa equals any of the naturally occurring L-amino acids
MRLFSQMLKSWMALFMRNVWLEMTIATXIQ

SEQ ID NO: 2083 - protein, 56 aa, Homo sapiens
MRLFSQMLKSWMALFMRNVWLEMTIATAHTVSTVHWRKWTKMLVQSPTQVKMNVSQ

SEQ ID NO: 2084 - protein, 563 aa, Homo sapiens
MGSLSNYALLQLTLTAFLTILVQPQHLLAPVFRTLSILTNQSNCWLCEHLDNAEQPELVFVPASASTWWTYSGQWMYERVWYPQAEVQNHSTSSYRKVTWHWEASMEAQGLSFAQVRLLEGNFSLCVENKNGSGPFLGNIPKQYCNQILWFDSTDGTFMPSIDVTNESRNDDDDPSVCLGTRQCSWFAGCTNRTWNSSAVPLIGLPNTQDYKWVDRNSGLTWSGNDTCLYSCQNQTKGLLYQLFRNLFCSYGLTEAHGKWRCADASITNDKGHDGHRTPTWWLTGSNLTLSVNNSGLFFLCGNGVYKGFPPKWSGRCGLGYLVPSLTRYLTLNASQITNLRSFIHKVTPHRCTQGDTDNPPLYCNPKDNSTIRALFPSLGTYDLEKAILNISKAMEQEFSATKQTLEAHQSKVSSLASASRKDHVLDIPTTQRQTACGTVGKQCCLYINYSEEIKSNIQRLHEASENLKNVPLLDWQGIFAKVGDWFRSWGYVLLIVLFCLFIFVLIYVRVFRKSRRSLNSQPLNLALSPQQSAQLLVSETSCQVSNRAMKGLTTHQYDTSLL

SEQ ID NO: 2085 - protein, 599 aa, Homo sapiens
MELLGPVPPEQQFINQKMRPGSGMLSIRVIPDGPTRALQITDFCHRKSSRSYEVDELPVTEQELQKLKNPDTEQELEVLVRLEGGIGLSLINKVPEELVFASLTGINVHYTQLATSHMLELSIQDVQVDNQLIGTTQPFMLYVTPLSNENEVIETGPAVQVNAVKFPSKSALTNIYKHLMITAQRFTVQIEEKLLLKLLSFFGYDQAESEVEKYDENLHEKTAEQGGTPIRYYFENLKISIPQIKLSVFTSNKLPLDLKALKSTLGFPLIRFEDAVINLDPFTRVHPYETKEFIINDILKHFQEELLSQAARILGSVDFLGNPMGLLNDVSEGVTGLIKYGNVGGLIRNVTHGVSNSAGKFAGTLSDGLGKTMDNRHQSEREYIRYHAATSGEHLVAGIHGLAHGIIGGLTSVITSTVEGVKTEGGVSGFISGLGKGLVGTVTKPVAGALDFASETAQAVRDTATLSGPRTQAQRVRKPRCCTGPQGLLPRYSESQAEGQEQLFKLTDNIQDEFFIAVENIDSYCVLISSKAVYFLKSGDYVDREAIFLEVKYDDLLPLPCLQRPWEGVCAGDQESREHEQWSVHPRPLPPEAHGPCEI

SEQ ID NO: 2086 - protein, 239 aa, Homo sapiens
MAPLLPSLPLHLHTSLCLRLCLSLSLSAWLSWSLPLCVSLSASYPAWRLLPQLHGRSREQRYTKLADWQYIEECVQAASPMPLFGNGDILSFEDANRAMQTGVTGIMIARGALLKPWLFTEIKEQRHWDISSSERLDILRDFTNYGLEHWGSDTQGVEKTRRFLLEWLSFLCRYVPVGLLERLPQRINERPPYYLGRDYLETLMASQKAADWIRISEMLLGPVPPSFAFLPKHKANAYK

SEQ ID NO: 2087 - protein, 127 aa, Homo sapiens [sequence omitted]

SEQ ID NO: 2088 - protein, 138 aa, Homo sapiens
MKMMVVLLMLSSLSRLLGLMRPSSLRQYLDSVPLPPCQEQQPKASAELDHKACYLCHSLLMLAGVVVSCQDITPDQWGELQLLCMQLDRHISTQIRESPQAMHRTMLKDLATQTYIRWQELLTHCQPQAQYFSPWKDI

SEQ ID NO: 2089 - protein, 132 aa, Homo sapiens [sequence omitted]

SEQ ID NO: 2090 - protein, 127 aa, Homo sapiens
  SITE (107): Xaa equals any of the naturally occurring L-amino acids
  SITE (109): Xaa equals any of the naturally occurring L-amino acids
  SITE (116): Xaa equals any of the naturally occurring L-amino acids
MFLLRPLPILLVTGGGYAGYRQYEKYRERELEKLGLEIPPKLAGHWEVALYKSVPTRLLSRAWGRLNQVELPHWLRRPVYSLYIWTFGVNMKEAAVEDLHHYRNLSXFXRRKLKAXGPACLWPAQRD

SEQ ID NO: 2091 - protein, 89 aa, Homo sapiens
  SITE (87): Xaa equals any of the naturally occurring L-amino acids
MFLLRPLPILLVTGGGYAGYRQYEKYRERELEKLGLEIPPKLAGHWEVALYKSVPTRLLSRAWGRLNQVELPHWLRRPVYSLYIWTXGG

SEQ ID NO: 2092 - protein, 90 aa, Homo sapiens [sequence omitted]

SEQ ID NO: 2093 - protein, 110 aa, Homo sapiens
  SITE (98): Xaa equals any of the naturally occurring L-amino acids
  SITE (100): Xaa equals any of the naturally occurring L-amino acids
MAAPALGLVCGRCPELGLVLLLLLLSLLCGAAGSQEAGTGAGAGSLAGSCGCGTPQRPGAHGSSAAAHRYSREANAPGPVPGERQLAHSKVLHRFLRXGXGLLGSWTGLE

SEQ ID NO: 2094 - protein, 374 aa, Homo sapiens
MAAPALGLVCGRCPELGLVLLLLLLSLLCGAAGSQEAGTGAGAGSLAGSCGCGTPQRPGAHGSSAAAHRYSREANAPGPVPGERQLAHSKMVPIPAGVFTMGTDDPQIKQDGEAPARRVTIDAFYMDAYEVSNTEFEKFVNSTGYLTEAEKFGDSFVFEGMLSEQVKTNIQQAVAAAPWWLPVKGANWRHPEGPDSTILHRPDHPVLHVSWNDAVAYCTWAGKRLPTEAEWEYSCRGGLHNRLFPWGNKLQPKGQHYANIWQGEFPVTNTGEDGFQGTAPVDAFPPNGYGLYNIVGNAWEWTSDWWTVHHSVEETLNPKGPPSGKDRVKKGGSYMCHRSYCYRYRCAARSQNTPDSSASNLGFRCAADRLPTMD

SEQ ID NO: 2095 - protein, 53 aa, Homo sapiens
MSTFVCVCVFCFVLRSEARAKRKQDQRNTKRCLLTKGQRDLSVNQSKINRTAN

SEQ ID NO: 2096 - protein, 215 aa, Homo sapiens
  SITE (7): Xaa equals any of the naturally occurring L-amino acids
MLPWTAXGLALSLRLALARSGAERGPPASAPRGDLMFLLDSSASVSHYEFSRVREFVGQLVAPLPLGTGALRASLVHVGSRPYTEFPFGQHSSGEAAQDAVRASAQRMGDTHTGLALVYAKEQLFAEASGARPGVPKVLVWVTDGGSSDPVGPPMQELKDLGVTVFIVSTGRGNFLELSAAASAPAEKHLHFVDVDDLHIIVQELRGSILDAMRP

SEQ ID NO: 2097 - protein, 127 aa, Homo sapiens
MVPGAAGWCCLVLWLPACVAAHGFRIHDYLYFQVLSPGDIRYIFTATPAKDFGGIFHTRYEQIHLVPAEPPEACGELSNGFFIQDQIALVERGGCSFLSKTRVVQEHGGRAVIISDNALTMTASTWR

SEQ ID NO: 2098 - protein, 188 aa, Homo sapiens; identical to SEQ ID NO: 1359

SEQ ID NO: 2099 - protein, 72 aa, Homo sapiens
MLVLFKFLPLTSSGRFLSVTLYHRVHHQTFFAGAKSFSPASTLNLYICSSQFQSLQKLYCGVIPVLRYASIE

SEQ ID NO: 2100 - protein, 112 aa, Homo sapiens
MAYLTLFQMGSWMSFSLSLCSLLFILTGHCLSENFYVRGDGTRAYFFTKGEVHSMFCKASLDEKQNLVDRRLQVNRKKQVKMHRVWIQGKFQKPLHQTQNSSNMVSTLLSQD

SEQ ID NO: 2101 - protein, 80 aa, Homo sapiens
MGWIDLLLPELGALRVFLHLFLVALRTKRWIFRTLGQLTCVNILGDSRKKRECRLNKRQLQFGEKTLQVPERLVVRHSPF

SEQ ID NO: 2102 - protein, 49 aa, Homo sapiens
MQVSSWVVFQLVWNSLVLTQTGIKHYFRFSLCQFLSSYNHVNQDVRTSI

SEQ ID NO: 2103 - protein, 179 aa, Homo sapiens
  SITE (143): Xaa equals any of the naturally occurring L-amino acids
MAQVLASELSLVAFILLLVMAFSKKWLDLSRSLFYQRWPVDVSNRIHTSAHVMSMGLLHFCKSRSCSDLENGKVTFIFSTLMLFPINIWIFELERNVSIPIGWSYFIGWLVLILYFTCAILCYFNHKSFWSLILSHPSGAVSXSSSFGSVEESPRAQTITDTPITQEGVLDPEQKDTHV

SEQ ID NO: 2104 - protein, 122 aa, Homo sapiens
MPPLAPQLCRAVFLVPILLLLQVKPLNGSPGPKDGSQTEKTPSADQNQEQFEEHFVASSVGEMWQVVDMAQQEEDQSSKTAAVHKHSFHLSFCFSLASVMVFSGGPLRRTFPNIQLCFMLTH

SEQ ID NO: 2105 - protein, 122 aa, Homo sapiens; identical to SEQ ID NO: 2104

SEQ ID NO: 2106 - protein, 459 aa, Homo sapiens
  SITE (321): Xaa equals any of the naturally occurring L-amino acids
  SITE (345): Xaa equals any of the naturally occurring L-amino acids
MGGPRAWALLCLGLLLPGGGAAWSIGAAPFSGRRNWCSYVVTRTISCHVQNGTYLQRVLQNCPWPMSCPGSSYRTVVRPTYKVMYKIVTAREWRCCPGHSGVSCEEVAASSASLEPMWSGSTMRRMALRPTAFSGCLNCSKVSELTERLKVLEAKMTMLTVIEQPVPPTPATPEDPAPLWGPPPAQGSPGDGGLQDQVGAWGLPGPTGPKGDAGSRGPMGMRGPPGPQGPPGSPGRAGAVGTPGERGPPGPPGPPGPPGPPAPVGPPHARISQHGDPLLSNTFTETNNHWPQGPTGPPGPPGPMGPPGPPGPTGVPGSPGXIGPPGPTGPKGISGHPGEKGEKKXLRGEPGPQGSAGQRGEPGPKGDPGEKSHWNQSWGLGGPCRHRHPQPPSGQEGGHATNYRDRGPQEPGRERLRVVAAPEADQARLPLLPGLGQLPPGTARPYLLMSSGSLLPSRP

SEQ ID NO: 2107 - protein, 615 aa, Homo sapiens [sequence omitted]

SEQ ID NO: 2108 - protein, 404 aa, Homo sapiens
  SITE (41): Xaa equals any of the naturally occurring L-amino acids
  SITE (77): Xaa equals any of the naturally occurring L-amino acids
  SITE (96): Xaa equals any of the naturally occurring L-amino acids
  SITE (98): Xaa equals any of the naturally occurring L-amino acids
  SITE (108): Xaa equals any of the naturally occurring L-amino acids
  SITE (122): Xaa equals any of the naturally occurring L-amino acids
  SITE (124): Xaa equals any of the naturally occurring L-amino acids
  SITE (126): Xaa equals any of the naturally occurring L-amino acids
  SITE (175): Xaa equals any of the naturally occurring L-amino acids
  SITE (192): Xaa equals any of the naturally occurring L-amino acids
  SITE (210): Xaa equals any of the naturally occurring L-amino acids
  SITE (236): Xaa equals any of the naturally occurring L-amino acids
  SITE (239): Xaa equals any of the naturally occurring L-amino acids
  SITE (309): Xaa equals any of the naturally occurring L-amino acids
  SITE (335): Xaa equals any of the naturally occurring L-amino acids
  SITE (389): Xaa equals any of the naturally occurring L-amino acids
MHPIPSSFMIKAVSSFLTAEEASVGNPEGAFMKVLQARKNXTSTELIVEPEEPSDSSGINLSGFGSEQLDTNDESDXISTLSYILPYFSAVNLDVXSXLLPFIKLPTXGNSLAKIQTVGQNXQXVXRVLMGPRSIQKRHFKEVGRQSIRREQGAQASVENAAEEKRLGSPAPREXEQPHTQQGPEKLAGNAXYTKPSFTQEHKAAVSVLXPFSKGAPSTSSPAKALPQVRDRWKDXTHXISILESAKARVTNMKASKPISHSRKKYRFHKTRSRMTHRTPKVKKSPKFRKKSYLSRLMLANRPPFSAAXSLINSPSQGAFSSLGDLSPQENPFLXVSAPSEHFIETTNIKDTTARNALEENVFMENTNMPEVTISENTNYNHPPEADSXGTAFNLGPTVKQTET

SEQ ID NO: 2109 - protein, 45 aa, Homo sapiens
MVTSGMLVFSIKTFSSKAFLAVVSFILVVSIKCSEGADTSRKGFS

SEQ ID NO: 2110 - protein, 45 aa, Homo sapiens; identical to SEQ ID NO: 2109

SEQ ID NO: 2111 - protein, 257 aa, Homo sapiens
MEMIIQFGFVTLFVASFPLAPLFALLNNIIEIRLDAKKFVTELRRPVAVRAKDIGIWYNILRGIGKLAVIINAFVISFTSDFIPRLVYLYMYSKNGTMHGFVNHTLSSFNVSDFQNGTAPNDPLDLGYEVQICRYKDYREPPWSENKYDISKDFWAVLAARLAFVIVFQNLVMFMSDFVDWVIPDIPKDISQQIHKEKVLMVELFMREEQDKQQLLETWMEKERQKDEPPCNHHNTKACPDSLGSPAPSHAYHGGVL

SEQ ID NO: 2112 - protein, 50 aa, Homo sapiens
MTHGCLSLASMAAGLGSVSLFLFVQQWTPTTASTGETPSSWQKTTSCVRR

SEQ ID NO: 2113 - protein, 50 aa, Homo sapiens; identical to SEQ ID NO: 2112

SEQ ID NO: 2114 - protein, 74 aa, Homo sapiens [sequence omitted]

SEQ ID NO: 2115 - protein, 94 aa, Homo sapiens
MWPWWLMVERTVVLLLITYLVPVGGSAVGPPGPGCNVSTSPPPPATRCPDESELYRDPGEAPLEADQAERGAAHEGGHPGRDPWGARRGPPRCG

SEQ ID NO: 2116 - protein, 180 aa, Homo sapiens
MAICSCQCPAAMAFCFLETLWWEFTASYDTTCIGLASRPYAFLEFDSIIQKVKWHFNYVSSSQMECSLEKIQEELKLQPPAVLTLEDTDVANGVMNGHTPMHLEPAPNFRMEPVTALGILSLILNIMCAALNLIRGVHLAEHSLQVAHEEIGNILAFLVPFVACIFQDPRSWFCWLDQTS

SEQ ID NO: 2117 - protein, 80 aa, Homo sapiens
MWPRMLAFSTWLEWLLFSPLPQSVGCPGPLEFYCVQDRRPPSLPDGADHFSSPTRITSSSISPALSLQAPEAGGFLSIPG

SEQ ID NO: 2118 - protein, 21 aa, Homo sapiens
MHDVLFFLSFSLVACVKAGML

SEQ ID NO: 2119 - protein, 291 aa, Homo sapiens
MDFIQHLGVCCLVALISVGLLSVAACWFLPSIIAAAASWIITCVLLCCSKHARCFILLVFLSCGLREGRNALIAAGTGIVILGHVENIFHNFKGLLDGMTCNLRAKSFSIHFPLLKKYIEAIQWIYGLATPLSVFDDLVSWNQTLAVSLFSPSHVLEAQLNDSKGEVLSVLYQMATTTEVLSSLGQKLLAFAGLSLVLLGTGLFMKRFLGPCGWKYENIYITRQFVQFDERERHQQRPCMLPLNKEERRKNKELKILSMILPLIYLCLNPTVSQNQNSFYLRPGFLSVLFF

SEQ ID NO: 2120 - protein, 257 aa, Homo sapiens
MDFIQHLGVCCLVALISVGLLSVAACWFLPSIIAAAASWIITCVLLCCSKHARCFILLVFLSCGLREGRNALIAAGTGIVILGHVENIFHNFKGLLDGMTCNLRAKSFSIHFPLLKKYIEAIQWIYGLATPLSVFDDLVSWNQTLAVSLFSPSHVLEAQLNDSKGEVLSVLYQMATTTEVLSSLGQKLLAFAGLSLVLLGTGLFMKRFLGPCGWKYENIYITRQFVQFDERERHQQRPCVLPLNKEERRKFISGFQS

SEQ ID NO: 2121 - protein, 257 aa, Homo sapiens; identical to SEQ ID NO: 2120

SEQ ID NO: 2122 - protein, 352 aa, Homo sapiens
  SITE (284): Xaa equals any of the naturally occurring L-amino acids
MDFIQHLGVCCLVALISVGLLSVAACWFLPSIIAAAASWIITCVLLCCSKHARCFILLVFLSCGLREGRNALIAAGTGIVILGHVENIFHNFKGLLDGMTCNLRAKSFSIHFPLLKKYIEAIQWIYGLATPLSVFDDLVSWNQTLAVSLFSPSHVLEAQLNDSKGEVLSVLYQMATTTEVLSSLGQKLLAFAGLSLVLLGTGLFMKRFLGPCGWKYENIYITRQFVQFDERERHQQRPCVLPLNKEERRKYVIIPTFWPTPKERKNLGLFFLPILIHLCIWVLXAAVDYLLYRLIFSVSKQFQSLPGFEVHLKLHGEKQGTQDIIHDSSFNISVFEPNCIPKPWQALKLLAH

SEQ ID NO: 2123 - protein, 259 aa, Homo sapiens
MVSCSILALTHLLFEFKGLMGTSTVEQLLENVCLLLASRTRDVVKSALGFIKVAVTVMDVAHLAKHVQLVMEAIGKLSDDMRRHFRMKLRNLFTKFIRKFGFELVKRLLPEEYHRVLVNIRKAEARAKRHRALSQAAVEEEEEEEEEEEPAQGKGDSIEEILADSEDEEDNEEEERSRGKEQRKLARQRSRAWLKEGGGDEPLNFLDPKVAQRVLATQPGPAGQEEGPQLQGERRWPADHKGGGRRQQDGGRGRCQRRR

SEQ ID NO: 2124 - protein, 42 aa, Homo sapiens
MLWLGTSLIFSSFSASFDGVPFLSSWLFWSSGSSPNSLIPPF

SEQ ID NO: 2125 - protein, 45 aa, Homo sapiens [sequence omitted]

SEQ ID NO: 2126 - protein, 54 aa, Homo sapiens
MWPFLHLLNMPFTLTQVVASPSSCSNWKPQHPEMPPPQIHCTHVCLCMRVCARV

SEQ ID NO: 2127 - protein, 136 aa, Homo sapiens
MLMLLTLLVLGMVWVASAIVDKNKANRESLYDFWEYYLPYLYSCISFLGVLLLLGECTGSGREWAGSLDQSNQARRKGNGGHVREGVESRVWQVTGSCPYSVYSTGSRPHVLRHWEAASQAPAAGRPGGAAVLLSL

SEQ ID NO: 2128 - protein, 74 aa, Homo sapiens
MHWTFSSSLGCLYHFSLSFSGLHTVLKSSPSSRFLLPCSSQVTQPSPVGQPRLVVQLPPVKVIGHRTGQCRGPG

SEQ ID NO: 2129 - protein, 253 aa, Homo sapiens
MDNRFATAFVIACVLSLISTIYMAASIGTDFWYEYRSPVQENSSDLNKSIWDEFISDEADEKTYNDALFRYNGTVGLWRRCITIPKNMHWYSPPERTESFDVVTKCVSFTLTEQFMEKFVDPGNHNSGIDLLRTYLWRCQFLLPFVSLGLMCFGALIGLCACICRSLYPTIATGILHLLAGLCTLGSVSCYVAGIELLHQKLELPDNVSGEFGWSFCLACVSAPLQFMASALFIWAAHTNRKEYTLMKAYRVA

SEQ ID NO: 2130 - protein, 253 aa, Homo sapiens; identical to SEQ ID NO: 2129

SEQ ID NO: 2131 - protein, 57 aa, Homo sapiens [sequence omitted]

SEQ ID NO: 2132 - protein, 41 aa, Homo sapiens [sequence omitted]

SEQ ID NO: 2133 - protein, 51 aa, Homo sapiens
MSLEPSTSSFNILLFPAFLRVFGWALGWMPWEYLYLSSKVTNGETGTQRGT

SEQ ID NO: 2134 - protein, 60 aa, Homo sapiens
  SITE (10): Xaa equals any of the naturally occurring L-amino acids
  SITE (42): Xaa equals any of the naturally occurring L-amino acids
MFFPCLPTLXLRILHSGWVGLFLLISSRAPSSSLAWKHGPGXLWWPRRPLRSCTGLASCG

SEQ ID NO: 2135 - protein, 60 aa, Homo sapiens
  SITE (10): Xaa equals any of the naturally occurring L-amino acids
  SITE (48): Xaa equals any of the naturally occurring L-amino acids
MFFPCLPTLXLRILHSGWVGLFLLISSRAPSSSLAWKHGPGELWWPRXPLRSCTGLASCG

SEQ ID NO: 2136 - protein, 78 aa, Homo sapiens
MSPHQPMQVSSSKTILWLVLSCLCPSSPHPVISGLPQWYIGVLAGIVPVAPIRPGDSGLDLQREGPQPILSQGLNRRT

SEQ ID NO: 2137 - protein, 78 aa, Homo sapiens; identical to SEQ ID NO: 2136

SEQ ID NO: 2138 - protein, 144 aa, Homo sapiens
MSAVSAPALWQTWCVPAARAWTSSTLRHDAVARPNPSTSLTPGLLTSSDSPRWPGLQEAPGRPCIRLGRSELCMYIYTYIDTFIIYTHSLYIYIHCFLAPELIWVQAHFKTLPGGGCFFSGFLAREEGEGTGWVFSLKRESRRF

SEQ ID NO: 2139 - protein, 151 aa, Homo sapiens
MLHWVLSFFFLLSCPRTEGLPGLYCPGCSQCPGRGMWPGDPGPGIQGPGLDLRTGMEATGAQQPTLSSPHCLLSLPTLPARAVQLRWDLSISRAGGRVAVLGLCLEPGGSLLLPPSALPETDPCAACPPCPFVPMSGGGGRPTVPEAGHQP

SEQ ID NO: 2140 - protein, 173 aa, Homo sapiens [sequence omitted]

SEQ ID NO: 2141 - protein, 82 aa, Homo sapiens; identical to SEQ ID NO: 2027

SEQ ID NO: 2142 - protein, 53 aa, Homo sapiens
MGQRGVFLLILDAFSVPSTASCLITPLPPPHPQPSQFFLASALQPYLGKEEWV

SEQ ID NO: 2143 - protein, 53 aa, Homo sapiens; identical to SEQ ID NO: 2142

SEQ ID NO: 2144 - protein, 53 aa, Homo sapiens; identical to SEQ ID NO: 2142

SEQ ID NO: 2145 - protein, 97 aa, Homo sapiens
MLWKLKLSRCWLDLTLLIFSQISHMDQIIFFFVVYPILNNIFSLNYCRDFFCGGYFLFCSKIIRCKAILCLTVALSKQLCSGVAFDVLEFDYMQSCI

SEQ ID NO: 2146 - protein, 122 aa, Homo sapiens
  SITE (63): Xaa equals any of the naturally occurring L-amino acids
  SITE (99): Xaa equals any of the naturally occurring L-amino acids
  SITE (122): Xaa equals any of the naturally occurring L-amino acids
MMTMTSDRWFSMAWASCSLSRPPLTPSCSCQQPATVALLLQTISVCSAQQADPLSPPRACRPXRQFPVLQSAGPPHSPHVYAFVLFPVSSRWQGGDFCXICCCFPQCLGRCLEHTRCSINPX

SEQ ID NO: 2147 - protein, 99 aa, Homo sapiens
MEGPRGWLVLCVLAISLASMVTEDLCRAPDGKKGEAGRPGRRGRPGLKGEQGEPGAPGIRTGIQGLKGDQGEPGPSGNPGKVGYPGPSGPLRSPWHPGN

SEQ ID NO: 2148 - protein, 245 aa, Homo sapiens
MEGPRGWLVLCVLAISLASMVTEDLCRAPDGKKGEAGRPGRRGRPGLKGEQGEPGAPGIRTGIQGLKGDQGEPGPSGNPGKVGYPGPSGPLGARGIPGIKGTKGSPGNIKDQPRPAFSAIRRNPPMGGNVVIFDTVITNQEEPYQNHSGRFVCTVPGYYYFTFQVLSQWEICLSIVSSSRGQVRRSLGFCDTTNKGLFQVVSGGMVLQLQQGDQVWVEKDPKKGHIYQGSEADSVFSGFLIFPSA

SEQ ID NO: 2149 - protein, 57 aa, Homo sapiens
MGHLHWGVSGNFFFPRLSLFLLFAWLQITQANEPRLPGKYSIKAIKITICITFRTSA

SEQ ID NO: 2150 - protein, 152 aa, Homo sapiens
MGVHVGAALGALWFCLTGALEVQVPEDPVVALVGTDATLCCSFSPEPGFSLAQLNLIWQLTDTKQLVHSFAEGQDQGSAYANRTALFLDLLAQGNASLRLQSVRVADEGQLHLLREHPGFRQRCRQPAGGRSLLEAQHDPGAQQGPAARGTW

SEQ ID NO: 2151 - protein, 302 aa, Homo sapiens
  SITE (128): Xaa equals any of the naturally occurring L-amino acids
MRLGSPGLLFLLFSSLRADTQEKEVRAMVGSDVELSCACPEGSRFDLNDVYVYWQTSESKTVVTYHIPQNSSLENVDSRYRNRALMSPAGMLRGDFSLRLFNVTPQDEQKFHCLVLSQSLGFQEVLSXEVTLHVAANFSVPVVSAPHSPSQDELTFTCTSINGYPRPNVYWINKTDNSLLDQALQNDTVFLNMRGLYDVVSVLRIARTPSVNIGCCIENVLLQQNLTVGSQTGNDIGERDKITENPVSTGEKNAATWSILAVLCLLVVVAVAIGWVCRDRCLQHSYAGAWAVSPETELTGHV

SEQ ID NO: 2152 - protein, 316 aa, Homo sapiens
MLRRRGSPGMGVHVGAALGALWFCLTGALEVQVPEDPVVALVGTDATLCCSFSPEPGFSLAQLNLIWQLTDTKQLVHSFAEGQDQGSAYANRTALFPDLLAQGNASLRLQRVRVADEGSFTCFVSIRDFGSAAVSLQVAAPYSKPSMTLEPNKDLRPGDTVTITCSSYQGYPEAEVFWQDGQGVPLTGNVTTSQMANEQGLFDVHSILRVVLGANGTYSCLVRNPVLQQDAHSSVTITGQPMTFPPEALWVTVGLSVCLIALLVALAFVCWRKIKQSCEEENAGAEDQDGEGEGSKTALQPLKHSDSKEDDGQEIA

SEQ ID NO: 2153 - protein, 831 aa, Homo sapiens
MKVHMHTKFCLICLLTFIFHHCNHCHEEHDHGPEALHRQHRGMTELEPSKFSKQAAENEKKYYIEKLFERYGENGRLSFFGLEKLLTNLGLGERKVVEINHEDLGHDHVSHLDILAVQEGKHFHSHNHQHSHNHLNSENQTVTSVSTKRNHKCDPEKETVEVSVKSDDKHMHDHNHRLRHHHRLHHHLDHNNTHHFHNDSITPSERGEPSNEPSTETNKTQEQSDVKLPKGKRKKKGRKSNENSEVITPGFPPNHDQGEQYEHNRVHKPDRVHNPGHSHVHLPERNGHDPGRGHQDLDPDNEGELRHTRKREAPHVKNNAIISLRKDLNEDDHHHECLNVTQLLKYYGHGANSPISTDLFTYLCPALLYQIDSRLCIEHFDKLLVEDINKDKNLVPEDEANIGASAWICGIISITVISLLSLLGVILVPIINQGCFKFLLTFLVALAVGTMSGDALLHLLPHSQGGHDHSHQHAHGHGHSHGHESNKFLEEYDAVLKGLVALGGIYLLFIIEHCIRMFKHYKQQRGKQKWFMKQNTEESTIGRKLSDHKLNNTPDSDWLQLKPLAGTDDSVVSEDRLNETELTDLEGQQESPPKNYLCIEEEKIIDHSHSDGLHTIHEHDLHAAAHNHHGENKTVLRKHNHQWHHKHSHHSHGPCHSGSDLKETGIANIAWMVIMGDGIHNFSDGLAIGAAFSAGLTGGISTSIAVFCHELPHELGDFAVLLKAGMTVKQAIVYNLLSAMMAYIGMLIGTAVGQYANNITLWIFAVTAGMFLYVALVDMLPEMLHGDGDNEEHGFCPVGQFILQNLGLLFGFAIMLVIALYEDKIVFDIQF

SEQ ID NO: 2154 - protein, 480 aa, Homo sapiens
MLFRNRFLLLLALAALLAFVSLSLQFFHLIPVSTPKNGMSSKSRKRIMPDPVTEPPVTDPVYEALLYCNIPSVAERSMEGHAPHHFKLVSVHVFIRHGDRYPLYVIPKTKRPEIDCTLVANRKPYHPKLEAFISHMSKGSGASFESPLNSLPLYPNHPLCEMGELTQTGVVQHLQNGQLLRDIYLKKHKLLPNDWSADQLYLETTGKSRTLQSGLALLYGFLPDFDWKKIYFRHQPSALFCSGSCYCPVRNQYLEKEQRRQYLLRLKNSQLEKTYGEMAKIVDVPTKQLRAANPIDSMLCHFCHNVSFPCTRNGCVDMEHFKVIKTHQIEDERERREKKLYFGYSLLGAHPILNQTIGRMQRATEGRKEELFALYSAHDVTLSPVLSALGLSEARFPRFAARLIFELWQDREKPSEHSVRILYNGVDVTFHTSFCQDHHKRSPKPMCPLENLVRFVKRDMFVALGGSGTNYYDACHREGF

SEQ ID NO: 2155 - protein, 151 aa, Homo sapiens
MFLMLGCALPIYNKYWPLFVLFFYILSPIPYCIARRLVDDTDAMSNACKELAIFLTTGIVVSAFGLPIVFARAHLMGRLPFFSKMGTAESEGRETLTQQLPLPAAAMRRLLPASRVSTQPVLRLADSAESLLGRPALWALGFLLCPPSQAQ

SEQ ID NO: 2156 - protein, 89 aa, Homo sapiens
MYMQDYWRTWLKGLRGFFFVGVLFSAVSIAAFCTFLVLAITRHQSLTDPTSYYLSSVWSFISFKWAFLLSLYAHRYRADFADISILSDF

SEQ ID NO: 2157 - protein, 56 aa, Homo sapiens
MRGHITTLLTTSFLVFGLHIIFFLNISCFNFRVFILFETRPEDSRLYRERPVLPRY

SEQ ID NO: 2158 - protein, 50 aa, Homo sapiens
MQVKNSIHVTFVARILVRVLICLSTSEAILARNHIYVVSVTNASVEVQTS

SEQ ID NO: 2159 - protein, 50 aa, Homo sapiens; identical to SEQ ID NO: 2158

SEQ ID NO: 2160 - protein, 81 aa, Homo sapiens
MRLLVLSSLLCILLLCFSIFSTEGKRRPAKAWSGRRTRLCCHRVPSPNSTNLKGHHVRLCKPCKLEPEPRLWVVPGALPQV

SEQ ID NO: 2161 - protein, 73 aa, Homo sapiens
MNITRKLWSRTFNCSVPCSDTVPVIAVSVFILFLPVVFYLSSFLHSEQKKRKLILPKRLKSSTSFANIQENSN

SEQ ID NO: 2162 - protein, 193 aa, Homo sapiens
MEPGPTAAQRRCSLPPWLPLGLLLWSGLALGALPFGSSPHRVFHDLLSEQQLLEVEDLSLSLLQGGGLGPLSLPPDLPDLDPECRELLLDFANSSAELTGCLVRSARPVRLCQTCYPLFQQVVSKMDNISRAAGNTSESQSCARSLLMADRMQIVVILSEFFNTTWQEANCANCLTNNSEELSNSTVYFLKSI

SEQ ID NO: 2163 - protein, 134 aa, Homo sapiens
MAPEVMEQVRGYDFKADIWSFGITAIELATGAAPYHKYPPMKVLMLTLQNDPPSLETGVQDKEMLKKYGKSFRKMISLCLQKDPEKRPTAAELLRHKFFQKAKNKEFLQEKTLQRAPTISERAKKVRRVPGSCP

SEQ ID NO: 2164 - protein, 334 aa, Homo sapiens
  SITE (105): Xaa equals any of the naturally occurring L-amino acids
MEPGPTAAQRRCSLPPWLPLGLLLWSGLALGALPFGSSPHRVFHDLLSEQQLLEVEDLSLSLLQGGGLGPLSLPPDLPDLDPECRELLLDFANSSAELTGCLVRXARPVRLCQTCYPLFQQVVSKMDNISRAAGNTSESQSCARSLLMADRMQIVVILSEFFNTTWQEANCANCLTNNSEELSNSTVYFLNLFNHTLTCFEHNLQGNAHSLLQTKNYSEVCKNCREAYKTLSSLYSEMQKMNELENKAEPGTHLCIDVEDAMNITRKLWSRTFNCSVPCSDTVPVIAVSVFILFLPVVFYLSSFLHSEQKKRKLILPKRLKSSTSFANIQENSN

SEQ ID NO: 2165 - protein, 49 aa, Homo sapiens
MVLVFAYLCVLLIVCWVTSKTSLALKYTVYKNFKRLIWNKSILIITLTP

SEQ ID NO: 2166 - protein, 75 aa, Homo sapiens
MSLSILVALSLQILFLFTILKCMLAKWVDFQIKCSFHKSFVMVFWSEMHFHFSFLFLLSILSFFPNKIYPGDYIC

SEQ ID NO: 2167 - protein, 86 aa, Homo sapiens [sequence omitted]

SEQ ID NO: 2168 - protein, 152 aa, Homo sapiens [sequence omitted]

SEQ ID NO: 2169 - protein, 142 aa, Homo sapiens [sequence omitted]

SEQ ID NO: 2170 - protein, 453 aa, Homo sapiens
MKLLVILIFSGLITCCGGNSSHSLPSKLLLVSFDGFRADYLQNYEFPHLQNFIKEGVLVEHVKNVFITKTFPNHYSIVTGLYEESHGIVANSMYDVITKKHFSDFDDKDPFWWNEAVPIWVTNQLQENRSSAAAMWPGTDVPIHNTTPSYFMNYSSSVSFEERLNNITMWLMNSNPPVTFATLYWEEPDASGHKYGPEDKENMYRVLKEVDDLIGELVHKLKVLGLWENLNVIITSDHGMTQCSKDKLINLDLCIDRSSYTLVDLTPVAAVLPKINTTEVYNKLKVCNPHMNVYLKEDIPARFHYQHNDRIQPIILVADEGWTIVLNKSLPKLGDHGYDNSLSSMHPFLAAHGPAFHKGYKHSTINSVDIYPMMCHILGLKPHPNNGTFGHTKCLLVDQWCINLPEAIGIVIGALLVLTTLTCLIIIMQNRLSVPRPFSRLQLQEDDDDPLIE

SEQ ID NO: 2171 - protein, 287 aa, Homo sapiens
MGALRPTLLPPSLPLLLLLMLGMGCWAREVLVPEGPLYRVAGTAVSISCNVTGYEGPAQQNFEWFLYRPEAPDTALGIVSTKDTQFSYAVFKSRVVAGEVQVQRLQGDAVVLKIARLQAQDAGIYECHTPSTDTRYLGSYSGKVELRVLPDVLQVSAAPPGPRGRQAPTSPPRMTVHEGQELALGCLARTSTQKHTHLAVSFGRSVPEAPVGRSTLQEVVGIRSDLAVEAGAPYAERLAAGELRLGKEGTDRYRMVVGGAQAGDAGTYHCTAAEWIQDPDGSWAQIA

SEQ ID NO: 2172 - protein, 613 aa, Homo sapiens
MGALRPTLLPPSLPLLLLLMLGMGCWAREVLVPEGPLYRVAGTAVSISCNVTGYEGPAQQNFEWFLYRPEAPDTALGIVSTKDTQFSYAVFKSRVVAGEVQVQRLQGDAVVLKIARLQAQDAGIYECHTPSTDTRYLGSYSGKVELRVLPDVLQVSAAPPGPRGRQAPTSPPRMTVHEGQELALGCLARTSTQKHTHLAVSFGRSVPEAPVGRSTLQEVVGIRSDLAVEAGAPYAERLAAGELRLGKEGTDRYRMVVGGAQAGDAGTYHCTAAEWIQDPDGSWAQIAEKRAVLAHVDVQTLSSQLAVTVGPGERRIGPGEPLELLCNVSGALPPAGRHAAYSVGWEMAPAGAPGPGRLVAQLDTEGVGSLGPGYEGRHIAMEKVASRTYRLRLEAARPGDAGTYRCLAKAYVRGSGTRLREAASARSRPLPVHVREEGVVLEAVAWLAGGTVYRGETASLLCNISVRGGPPGLRLAASWWVERPEDGELSSVPAQLVGGVGQDGVAELGVRPGGGPVSVELVGPRSHRLRLHSLGPEDEGVYHCAPSAWVQHADYSWYQAGSARSGPVTVYPYMHALDTLFVPLLVGTGVALVTGATVLGTITCCFMKRLRKR

SEQ ID NO: 2173 - protein, 122 aa, Homo sapiens
MWGWGSLVSARGGWGVFIYLYMGLYIVLWGMGEPAGGENPPLSPHPPGRANVKLLIFVLYIFYINISIFFLQNQFINGRGVWGGHMELPLWGGPLHYPTYRPFPHPPPHSPPPGCDCCKMGV

SEQ ID NO: 2174 - protein, 613 aa, Homo sapiens
  SITE (507): Xaa equals any of the naturally occurring L-amino acids
MGALRPTLLPPSLPLLLLLMLGMGCWAREVLVPEGPLYRVAGTAVSISCNVTGYEGPAQQNFEWFLYRPEAPDTALGIVSTKDTQFSYAVFKSRVVAGEVQVQRLQGDAVVLKIARLQAQDAGIYECHTPSTDTRYLGSYSGKVELRVLPDVLQVSAAPPGPRGRQAPTSPPRMTVHEGQELALGCLARTSTQKHTHLAVSFGRSVPEAPVGRSTLQEVVGIRSDLAVEAGAPYAERLAAGELRLGKEGTDRYRMVVGGAQAGDAGTYHCTAAEWIQDPDGSWAQIAEKRAVLAHVDVQTLSSQLAVTVGPGERRIGPGEPLELLCNVSGALPPAGRHAAYSVGWEMAPAGAPGPGRLVAQLDTEGVGSLGPGYEGRHIAMEKVASRTYRLRLEAARPGDAGTYRCLAKAYVRGSGTRLREAASARSRPLPVHVREEGVVLEAVAWLAGGTVYRGETASLLCNISVRGGPPGLRLAASWWVERPEDGELSSVPAQLVGGVGQDGVAXLGVRPGGGPVSVELVGPRSHRLRLHSLGPEDEGVYHCAPSAWVQHADYSWYQAGSARSGPVTVYPYMHALDTLFVPLLVGTGVALVTGATVLGTITCCFMKRLRKR

SEQ ID NO: 2175 - protein, 60 aa, Homo sapiens
MAWAVTLILSLSRAVRTQEVPMALQAHSGIQLASRVGLPGPWPECSTLSSRCHLSMDSKV

SEQ ID NO: 2176 - protein, 396 aa, Homo sapiens
MWWLLLWGVLQACPTRGSVLLAQELPQQLTSPGYPEPYGKGQESSTDIKAPEGFAVRLVFQDFDLEPSQDCAGDSVTISFVGSDPSQFCGQQGSPLGRPPGQREFVSSGRSLRLTFRTQPSSENKTAHLHKGFLALYQTVAVNYSQPISEASRGSEAINAPGDNPAKVQNHCQEPYYQAAAAGALTCATPGTWKDRQDGEEVLQCMPVCGRPVTPIAQNQTTLGSSRAKLGNFPWQAFTSIHGRGGGALLGDRWILTAAHTIYPKDSVSLRKNQSVNVFLGHTAIDEMLKLGNHPVHRVVVHPDYRQNESHNFSGDIALLELQHSIPLGPNVLPVCLPDNETLYRSGLLGYVSGFGMEMGWLTTELKYSRLPVAPREACNAWLQKRQRPEKKKKKK

SEQ ID NO: 2177 - protein, 172 aa, Homo sapiens
GTRTERDELLKDLQQSIAREPSAPSIPTPAYQSLPAGGHAPTPPTPAPRTMPPTKPQPPARPPPPVLPANRAPSATAPSPVGAGTAAPAPSQTPGSAPPPQAQGPPYPTYPGYPGYCQMPMPMGYNPYAYGQYNMPYPPVYHQSPGQAPYPGPQQPSYPFPQPPQQSYYPQQ

SEQ ID NO: 2178 - protein, 142 aa, Homo sapiens
  SITE (111): Xaa equals any of the naturally occurring L-amino acids
MHQLLQLQRQEPCRLLSPSPQPGLHHLCFQQIELLLLLLHLQWGLGLLRQLHHKRLAQLLLHRRRDHPIPPIQDILGIAKCPCPWAIILMRMASIICHIHQCITRVLDRLXTRDPSSLHTPSLSPHSSLTIHSSNMSAQQLS

SEQ ID NO: 2179 - protein, 868 aa, Homo sapiens
  SITE (194): Xaa equals any of the naturally occurring L-amino acids
  SITE (309): Xaa equals any of the naturally occurring L-amino acids
  SITE (550): Xaa equals any of the naturally occurring L-amino acids
MATFISVQLKKTSEVDLAKPLVKFIQQTYPSGGEEQAQYCRAAEELSKLRRAAVGRPLDKHEGALETLLRYYDQICSIEPKFPFSENQICLTFTWKDAFDKGSLFGGSVKLALASLGYEKSCVLFNCAALASQIAAEQNLDNDEGLKIAAKHYQFASGAFLHIKETVLSALSREPTVDISPDTVGTLSLIMLAXAQEVFFLKATRDKMKDAIIAKLANQAADYFGDAFKQCQYKDTLPKEVFPVLAAKHCIMQANAEYHQSILAKQQKKFGEEIARLQHAAELIKTVASRYDEYVNVKDFSDKINRALXAAKKDNDFIYHDRVPDLKDLDPIGKATLVKSTPVNVPISQKFTDLFEKMVPVSVQQSLAAYNQRKADLVNRSIAQMREATTLANGVLASLNLPAAIEDVSGDTVPQSILTKSRSVIEQGGIQTVDQLIKELPELLQRNREILDESLRLLDEEEATDNDLRAKFKERWQRTPSNELYKPLRAEGTNFRTVLDKAVQADGQVKECYQSHRDTIVLLCKPEPELNAAIPSANPAKTMQGSEVVXVLKSLLSNLDEVKKEREGLENDLKSVNFDMTSKFLTALAQDGVINEEALSVTELDRVYGGLTTKVQESLKKQEGLLKNIQVSHQEFSKMKQSNNEANLREEVLKNLATAYDNFVELVANLKEGTKFYNELTEILVRFQNKCSDIVFARKTERDELLKDLQQSIAREPSAPSIPTPAYQSLPAGGHAPTPPTPAPRTMPPTKPQPPARPPPPVLPANRAPSATAPSPVGAGTAAPAPSQTPGSAPPPQAQGPPYPTYPGYPGYCQMPMPMGYNPYAYGQYNMPYPPVYHQSPGQAPYPGPQQPSYPFPQPPQQSYYPQQ

SEQ ID NO: 2180 - protein, 102 aa, Homo sapiens
MKPATASALLLLLLGLAWTQGSHGWGADASSLQKRAGRADQPGAGWQEVAAVTSKNYNYNQHAYPTAYGGKYSVKTPAKGGVSPSSSASRVQPGLLQWVKFW

SEQ ID NO: 2181 - protein, 140 aa, Homo sapiens
  SITE (36): Xaa equals any of the naturally occurring L-amino acids
MFLFGGFLMTLFGLFVSLVFLGQAFTIMLVYVWSRXNPYVRMNFFGLLNFQAPFLPWVLMGFSLLLGNSIIVDLLGIAVGHIYFFLEDVFPNQPGGIRILKTPSILKAIFDTPDEDPNYNPLPEERPGGFAWGEGQRLGG

SEQ ID NO: 2182 - protein, 156 aa, Homo sapiens
MLEEGSFRGRTADFVFMFLFGGFLMTLFGLFVSLVFLGQAFTIMLVYVWSRRNPYVRMNFFGLLNFQAPFLPWVLMGFSLLLGNSIIVDLLGIAVGHIYFFLEDVFPNQPGGIRILKTPSILKAIFDTPDEDPNYNPLPEERPGGFAWGEGQRLGG

SEQ ID NO: 2183 - protein, 239 aa, Homo sapiens
MAYQSLRLEYLQIPPVSRAYTTACVLTTAAVQLELITPFQLYFNPELIFKHFQIWRLITNFLFFGPVGFNFLFNMIFLYRYCRMLEEGSFRGRTADFVFMFLFGGFLMTLFGLFVSLVFLGQAFTIMLVYVWSRRNPYVRMNFFGLLNFQAPFLPWVLMGFSLLLGNSIIVDLLGIAVGHIYFFLEDVFPNQPGGIRILKTPSILKAIFDTPDEDPNYNPLPEERPGGFAWGEGQRLGG

SEQ ID NO: 2184 - protein, 132 aa, Homo sapiens
MTLFGLFVSLVFLGQAFTIMLVYVWSRRNPYVRMNFFGLLNFQAPFLPWVLMGFSLLLGNSIIVDLLGIAVGHIYFFLEDVFPNQPGGIRILKTPSILKAIFDTPDEDPNYNPLPEERPGGFAWGEGQRLGG

SEQ ID NO: 2185 - protein, 339 aa, Homo sapiens
MSWSTFLLAEACGFTGVVAVLFCGITQAHYTYNNLSVESRSRTKQLFEVLHFLAENFIFSYMGLALFTFQKHVFSPIFIIGAFVAIFLGRAAHIYPLSFFLNLGRRHKIGWNFQHMMMFSGLRGAMAFALAIRDTASYARQMMFTTTLLIVFFTVWIIGGGTTPMLSWLNIRVGVDPDQDPPPNNDSFQVLQGDGPDSARGNRTKQESAWIFRLWYSFDHNYLKPILTHSGPPLTTTLPAWCGLLARCLTSPQVYDNQEPLREEDSDFILTEGDLTLTYGDSTVTANGSSSSHTASTSLEGSRRTKSSSEEVLERDLGMGDQKVSSRGTRLVFPLEDNA

SEQ ID NO: 2186 - protein, 339 aa, Homo sapiens; identical to SEQ ID NO: 2185

SEQ ID NO: 2187 - protein, 509 aa, Homo sapiens
  SITE (20): Xaa equals any of the naturally occurring L-amino acids
  SITE (168): Xaa equals any of the naturally occurring L-amino acids
  SITE (198): Xaa equals any of the naturally occurring L-amino acids
  SITE (199): Xaa equals any of the naturally occurring L-amino acids
  SITE (244): Xaa equals any of the naturally occurring L-amino acids
  SITE (246): Xaa equals any of the naturally occurring L-amino acids
  SITE (294): Xaa equals any of the naturally occurring L-amino acids
  SITE (301): Xaa equals any of the naturally occurring L-amino acids
  SITE (303): Xaa equals any of the naturally occurring L-amino acids
  SITE (493): Xaa equals any of the naturally occurring L-amino acids
  SITE (498): Xaa equals any of the naturally occurring L-amino acids
  SITE (499): Xaa equals any of the naturally occurring L-amino acids
  SITE (505): Xaa equals any of the naturally occurring L-amino acids
MEELATEKEAEESHRQDSVXLLTFILLLTLTILTIWLFKHRRVRFLHETGLAMIYGLIVGVILRYGTPATSGRDKSLSCTQEDRAFSTLLVNVSGKFFEYTLKGEISPGKINSVEQNDMLRKVTFDPEVFFNILLPPIIFHAGYSLKKRHFFRNLGSILAYAFLGTAXSCFIIGNLMYGVVKLMKIMGQLSDKFYYTXXLFFGAIISATDPVTVLAIFNELHADVDLYALLFGESVLNDAVAIXLXSSIVAYQPAGLNTHAFDAAAFFKSVGIFLGIFSGSFTMGAVTGVVTAXVTKFTKXHXFPLLETALFFLMSWSTFLLAEACGFTGVVAVLFCGITQAHYTYNNLSVESRSRTKQLFEVLHFLAENFIFSYMGLALFTFQKHVFSPIFIIGAFVAIFLGRAAHIYPLSFFLNLGRRHKIGWNFQHMMMFSGLRGAMAFALAIRDTASYARQMMFTTTLLIVFFTVWIIGGGTTPMLSWLNIRVGVDPDXDPPPXXDSFAFXTETA

SEQ ID NO: 2188 - protein, 146 aa, Homo sapiens
MTMRSLLRTPFLCGLLWAFCAPGARAEEPAASFSQPGSMGLDKNTVHDQEHIMEHLEGVINKPEAEMSPQELQLHYFKMHDYDGNNLLDGLELSTAITHVHKEEGSEQAPLMSEDELINIIDGVLRDDDKNNDGYIDYAEFAKSLQ

SEQ ID NO: 2189 - protein, 530 aa, Homo sapiens
  SITE (488): Xaa equals any of the naturally occurring L-amino acids
  SITE (490): Xaa equals any of the naturally occurring L-amino acids
  SITE (494): Xaa equals any of the naturally occurring L-amino acids
  SITE (495): Xaa equals any of the naturally occurring L-amino acids
  SITE (505): Xaa equals any of the naturally occurring L-amino acids
MEFGLTWVFLVALLRGVHCQVQLVESGGAVVQPGGSLRLSCAASGFTFSRYGMHWVRQAPGKGLQWLALVLHDGGQKYNEDVVKGRFTISRDNSNNKVYLQMDSLRGEDTATYYCVRGMWEQLPSYYFDYWGQGTLVTVSSASPTSPKVFPLSLCSTQPDGNVVIACLVQGFFPQEPLSVTWSESGQGVTARNFPPSQDASGDLYTTSSQLTLPATQCLAGKSVTCHVKHYTNPSQDVTVPCPVPSTPPTPSPSTPPTPSPSCCHPRLSLHRPALEDLLLGSEANLTCTLTGLRDASGVTFTWTPSSGKSAVQGPPDRDLCGCYSVSSVLPGCAEPWNHGKTFTCTAAYPESKTPLTATLSKSGNTFRPEVHLLPPPSEELALNELVTLTCLARGFSPKDVLVRWLQGSQELPREKYLTWASRQEPSQGTTTFAVTSILRVAAEDWKKGDTFSCMVGHEALPLAFTQKTIDRLAGKPTHVNVSVVMAXVXGPCXXAARLSPPLNXLHAPPKKKKKKKKKKKKKKKKKKKK

SEQ ID NO: 2190 - protein, 265 aa, Homo sapiens
MGGQVAGVYAAYYPSDVSSLCLVCPAGLQYSTDNQFVQRLKELQGSAAVEKIPLIPSTPEEMSEMLQLCSYVRFKVPQQILQGLVDVRIPHNNFYRKLFLEIVSEKSRYSLHQNMDKIKVPTQIIWGKQDAGAGCVWGRHVGQVNCQLPGGASGKLWALSSDGKTQEDSQAHNRLFSFCAQHRQQQEAGLRPRLQPAFCTQHLLPSPKSDAATTLRDPAPNAVGAPVTLRKPVPYPWYPRFPRALGTTRKPPRYFSQNRNSYGTK

SEQ ID NO: 2191 - protein, 99 aa, Homo sapiens
MAVWGDTELAAGVFCFFLFFCFLYLSGTWNASKTELFTPLERELKPGHPSGMLSGSHPHGAQQAKSTGLKLSLPAQQSEVDLGCSSLVWGGASAITEAL

SEQ ID NO: 2192 - protein, 144 aa, Homo sapiens
MPTTTEQPVTTTFPVTTGLKPTVALCQQKCRRTGTLEGNYCSSDFVLAGTVITTITRDGSLHATVSIINIYKEGNLAIQQAGKNMSARLTVVCKQCPLLRRGLNYIIMGQVGEDGRGKIMPNSFIMMFKTKNQKLLDALKNKQC

SEQ ID NO: 2193 - protein, 294 aa, Homo sapiens
  SITE (93): Xaa equals any of the naturally occurring L-amino acids
  SITE (97): Xaa equals any of the naturally occurring L-amino acids
MMVQMISDANTAGNGFMAMFSAAEPNERGDQYCGGLLDRPSGSFKTPNWPDRDYPAGVTCVWHIVAPKNQLIELKFEKFDVERDNYCRYDYVXVFNXGEVNDARRIGKYCGDSPPAPIVSERNELLIQFLSDLSLTADGFIGHYIFRPKKLPTTTEQPVTTTFPVTTGLKPTVALCQQKCRRTGTLEGNYCSSDFVLAGTVITTITRDGSLHATVSIINIYKEGNLAIQQAGKNMSARLTVVCKQCPLLRRGLNYIIMGQVGEDGRGKIMPNSFIMMFKTKNQKLLDALKNKQC

SEQ ID NO: 2194 - protein, 487 aa, Homo sapiens
MKHLWFFLLLVAAPRWVLSQVQLQESGPGLVKPSETLSLTCTVSGGSISSGGHYWSWIRQHPGKGLEWIGYISYNGVTYYNPSLKSRVTISVDTSQNQFSLRLSSVTAADTAVYYCAKDHRATRDGYQLEYRGFDYWGQGILVTVSSASPTSPKVFPLSLDSTPQDGNVVVACLVQGFFPQEPLSVTWSESGQNVTARNFPPSQDASGDLYTTSSQLTLPATQCPDGKSVTCHVKHYTNPSQDVTVPCPVPPPPPCCHPRLSLHRPALEDLLLGSEANLTCTLTGLRDASGATFTWTPSSGKSAVQGPPERDLCGCYSVSSVLPGCAQPWNHGETFTCTAAHPELKTPLTANITKSGNTFRPEVHLLPPPSEELALNELVTLTCLARGFSPKDVLVRWLQGSQELPREKYLTWASRQEPSQGTTTFAVTSILRVAAEDWKKGDTFSCMVGHEALPLAFTQKTIDRLAGKPTHVNVSVVMAEVDGTCY

SEQ ID NO: 2195 - protein, 189 aa, Homo sapiens [sequence omitted]

SEQ ID NO: 2196 - protein, 298 aa, Homo sapiens
MKTLQSTLLLLLLVPLIKPAPPTQQDSRIIYDYGTDNFEESIFSQDYEDKYLDGKNIKEKETVIIPNEKSLQLQKDEAITPLPPKKENDEMPTCLLCVCLSGSVYCEEVDIDAVPPLPKESAYLYARFNKIKKLTAKDFADIPNLRRLDFTGNLIEDIEDGTFSKLSLLEELSLAENQLLKLPVLPPKLTLFNAKYNKIKSRGIKANAFKKLNNLTFLYLDHNALESVPLNLPESLRVIHLQFNNIASITDDTFCKANDTSYIRDRIEEIRLEGNPIVLGKHPNSFICLKRLPIGSYF

SEQ ID NO: 2197 - protein, 298 aa, Homo sapiens; identical to SEQ ID NO: 2196

SEQ ID NO: 2198 - protein, 42 aa, Homo sapiens
MECKKRIQLIMLASIVRLPPTEQSGLLKTRFHNFCQRNLQSS

SEQ ID NO: 2199 - protein, 472 aa, Homo sapiens
MIRTRRGWSSMWPWIGVGYLAGCLVHALGEKQPELQISERDVLCVQIAGLCHDLGHGPFSHMFDGRFIPLARPEVKWTHEQGSVMMFEHLINSNGIKPVMEQYGLIPEEDICFIKEQIVGPLESPVEDSLWPYKGRPENKSFLYEIVSNKRNGIDVDKWDYFARDCHHLGIQNNFDYKRFIKFARVCEVDNELRICARDKEVGNLYDMFHTRNSLHRRAYQHKVGNIIDTMITDAFLEADDYIEITGAGGKKYRISTAIDDMEAYTKLTDNIFLEILYSTDPKLKDAREILKQIEYRNLFKYVGETQPTGQIKIKREDYESLPKEVASAKPKVLLDVKLKAEDFIVDVINMDYGMQEKNPIDHVSFYCKTAPNRAIRITKNQVSQLLPEKFAEQLIRVYCKKVDRKSLYAARQYFVQWCADRNFTKPQDGDVIAPLITPQKKEWNDSTSVQNPTRLREASKSRVQLFKDDPM

SEQ ID NO: 2200 - protein, 626 aa, Homo sapiens
  SITE (353): Xaa equals any of the naturally occurring L-amino acids
  SITE (354): Xaa equals any of the naturally occurring L-amino acids
  SITE (363): Xaa equals any of the naturally occurring L-amino acids
MQRADSEQPSKRPRCDDSPRTPSNTPSAEADWSPGLELHPDYKTWGPEQVCSFLRRGGFEEPVLLKNIRENEITGALLPCLDESRFENLGVSSLGERKKLLSYIQRLVQIHVDTMKVINDPIHGHIELHPLLVRIIDTPQFQRLRYIKQLGGGYYVFPGASHNRFEHSLGVGYLAGCLVHALGEKQPELQISERDVLCVQIAGLCHDLGHGPFSHMFDGRFIPLARPEVKWTHEQGSVMMFEHLINSNGIKPVMEQYGLIPEEDICFIKEQIVGPLESPVEDSLWPYKGRPENKSFLYEIVSNKRNGIDVDKWDYFARDCHHLGIQNNFDYKRFIKFARVCEVDNELRICARXXEVGNLYDMXHTRNSLHRRAYQHKVGNIIDTMITDAFLKADDYIEITGAGGKKYRISTAIDDMEAYTKLTDNIFLEILYSTDPKLKDAREILKQIEYRNLFKYVGETQPTGQIKIKREDYESLPKEVASAKPKVLLDVKLKAEDFIVDVINMDYGMQEKNPIDHVSFYCKTAPNRAIRITKNQVSQLLPEKFAEQLIRVYCKKVDRKSLYAARQYFVQWCADRNFTKPQDGDVIAPLITPQKKEWNDSTSVQNPTRLREASKSRVQLFKDDPM

SEQ ID NO: 2201 - protein, 245 aa, Homo sapiens
  SITE (128): Xaa equals any of the naturally occurring L-amino acids
MEGPRGWLVLCVLAISLASMVTEDLCRAPDGKKGEAGRPGRRGRPGLKGEQGEPGAPGIRTGIQGLKGDQGEPGPSGNPGKVGYPGPSGPLGARGIPGIKGTKGSPGNIKDQPRPAFSAIRRNPPMGXNVVIFDTVITNQEEPYQNHSGRFVCTVPGYYYFTFQVLSQWEICLSIVSSSRGQVRRSLGFCDTTNKGLFQVVSGGMVLQLQQGDQVWVEKDPKKGHIYQGSEADSVFSGFLIFPSA

SEQ ID NO: 2202 - protein, 32 aa, Homo sapiens
MGVNKVLFTFFFFSSLLDGVGTSHSLASFPHT

SEQ ID NO: 2203 - protein, 245 aa, Homo sapiens; identical to SEQ ID NO: 2148

SEQ ID NO: 2204 - protein, 245 aa, Homo sapiens; identical to SEQ ID NO: 2148

SEQ ID NO: 2205 - protein, 245 aa, Homo sapiens; identical to SEQ ID NO: 2148

SEQ ID NO: 2206 - protein, 245 aa, Homo sapiens; identical to SEQ ID NO: 2148

SEQ ID NO: 2207 - protein, 229 aa, Homo sapiens
  SITE (47): Xaa equals any of the naturally occurring L-amino acids
  SITE (49): Xaa equals any of the naturally occurring L-amino acids
MEGPRGWLVLCVLAISLASMVTEDLCRAPDGKKGEAGRPGRRGRPGXKXLKGDQGEPGPSGNPGKVGYPGPSGPLGARGIPGIKGTKGSPGNIKDQPRPAFSAIRRNPPMGGNVVIFDTVITNQEEPYQNHSGRFVCTVPGYYYFTFQVLSQWEICLSIVSSSRGQVRRSLGFCDTTNKGLFQVVSGGMVLQLQQGDQVWVEKDPKKGHIYQGSEADSVFSGFLIFPSA

SEQ ID NO: 2208 - protein, 207 aa, Homo sapiens
  SITE (75): Xaa equals any of the naturally occurring L-amino acids
  SITE (77): Xaa equals any of the naturally occurring L-amino acids
  SITE (112): Xaa equals any of the naturally occurring L-amino acids
MDVGPSSLPHLGLKLLLLLLLLPLRGQANTGCYGIPGMPGLPGAPGKDGYDGLPGPKGEPGIPAIPGIRGPKGQXGXAEIPVSVHGHSADPPAPCTQQPDQIQRGPHQPAEXYDTSTGKFTCKVPGLYYFVYHASHTANLCVLLYRSGVKVVTFCGHTSKTNQVNSGGVLLRLQVGEEVWLAVNDYYDMVGIQGSDSVFSGFLLFPD

SEQ ID NO: 2209 - protein, 235 aa, Homo sapiens
MDMRVPAQLLGLLLLWLRGARCDMQMTQSPSSLSASVGDRVTITCRTSQSIGKFLNWYQQKPGQAPKLLISGASILQTGVPSRFSGSGSATYFTLTINDLHPEDSATYYCQQDYTTPLFGQGTKVEIKRTVAAPSVFIFPPSDEQLKSGTASVVCLLNNFYPREAKVQWKVDNALQSGNSQESVTEQDSKDSTYSLSSTLTLSKADYEKHKVYACEVTHQGLSSPVTKSFNRGEC

SEQ ID NO: 2210 - protein, 234 aa, Homo sapiens
  SITE (120): Xaa equals any of the naturally occurring L-amino acids
MRVPAQLLGLLLLWLSGARCDIQLTQSPSSLSASLGDSVTITCQASQDIANYLNWYQQKPGKPPKLVIFDGSILHTGVPSRFSGGGSGTHFTFTINNLQPDDVATYSCQQYNTFPLTFGXGTKVEIKRTVAAPSVFIFPPSDEQLKSGTASVVCLLNNFYPREAKVQWKVDNALQSGNSQESVTEQDSKDSTYSLSSTLTLSKADYEKHKVYACEVTHQGLSSPVTKSFNRGEC

SEQ ID NO: 2211 - protein, 206 aa, Homo sapiens
MDVGPSSLPHLGLKLLLLLLLLPLRGQANTGCYGIPGMPGLPGAPGKDGYDGLPGPKGEPGIPAIPGIRGPKGRYKQKFQSVFTVTRQTHQPPAPNSLIRFNAVLTNPQGDYDTSTGKFTCKVPGLYYFVYHASHTANLCVLLYRSGVKVVTFCGHTSKTNQVNSGGVLLRLQVGEEVWLAVNDYYDMVGIQGSDSVFSGFLLFPD

SEQ ID NO: 2212 - protein, 208 aa, Homo sapiens
MDVGPSSLPHLGLKLLLLLLLLPLRGQANTGCYGIPGMPGLPGAPGKDGYDGLPGPKGEPGIPAIPGIRGPKGQKGEPGLPGHPGKNGPMGPPGMPGVPGPMGIPGEPGEEGRYKQKFQSVFTVTRQTHQPPAPNSLIRFNAVLTNPQEIMTRALASSPAKSPASTTLSTTRRIQPTCACCCTAAASKWSPSVATRPKPIRSTRAVCC

SEQ ID NO: 2213 - protein, 263 aa, Homo sapiens
  SITE (27): Xaa equals any of the naturally occurring L-amino acids
  SITE (112): Xaa equals any of the naturally occurring L-amino acids
MCLLGGLSAPPLLLLPLLPLLLCPPTXQGDCSFPPELPNAIQSVGDQQSFPEKFTVTYKCKEGFVKVPGKADSVVCLNNKWSEVAEFCNRSCDVPTRLQFASLKKSFTKQNXFPVGSVVEYECRPGYQRDHLLSGKLTCLLNFTWSKPDEFCKRKSCPNPGDLRHGHVNIPTDILYAAVIHFSCNKGYRLVGAASSYCSIVNDDVGWSDPLPECQEIFCPEPPKISNGVILDQQNTYVYQQAVKYECIKGFTLIGENSDLLYC

SEQ ID NO: 2214 - protein, 55 aa, Homo sapiens
MCLLGGLSAPPLLLLPLLPLLLCPPTGRVTAAFPQSYLMPYKVWVTNRVFLKNSQ

SEQ ID NO: 2215 - protein, 350 aa, Homo sapiens
  SITE (3): Xaa equals any of the naturally occurring L-amino acids
  SITE (4): Xaa equals any of the naturally occurring L-amino acids
MAXXVVLLALVAGVLGNEFSILKSPGSVVFRNGNWPIPGERIPDVAALSMGFSVKEDLSWPGLAVGNLFHRPRATVMVMVKGVNKLALPPGSVISYPLENAVPFSLDSVANSIHSLFSEETPVVLQLAPSEERVYMVGKANSVFEDLSVTLRQLRNRLFQENSVLSSLPLNSLSRNNEVDLLFLSELQVLHDISSLLSRHKHLAKDHSPDLYSLELAGLDEIGKRYGEDSEQFRDASKILVDALQKFADDMYSLYGGNAVVELVTVKSFDTSLIRKTRTILEAKQAKNPASPYNLAYKYNFEYSVVFNMVLWIMIALALAVIITSYNIWNMDPGYDSIIYRMTNQKIRMD

SEQ ID NO: 2216 - protein, 350 aa, Homo sapiens
MAVFVVLLALVAGVLGNEFSILKSPGSVVFRNGNWPIPGERIPDVAALSMGFSVKEDLSWPGLAVGNLFHRPRATVMVMVKGVNKLALPPGSVISYPLENAVPFSLDSVANSIHSLFSEETPVVLQLAPSEERVYMVGKANSVFEDLSVTLRQLRNRLFQENSVLSSLPLNSLSRNNEVDLLFLSELQVLHDISSLLSRHKHLAKDHSPDLYSLELAGLDEIGKRYGEDSEQFRDASKILVDALQKFADDMYSLYGGNAVVELVTVKSFDTSLIRKTRTILEAKQAKNPASPYNLAYKYNFEYSVVFNMVLWIMIALALAVIITSYNIWNMDPGYDSIIYRMTNQKIRMD

SEQ ID NO: 2217 - protein, 167 aa, Homo sapiens
  SITE (61): Xaa equals any of the naturally occurring L-amino acids
  SITE (79): Xaa equals any of the naturally occurring L-amino acids
MCSLFHAFIFAQLWTVYCEQSAVATNLQNQNEFSFTAILTALEFWSRVTPSILQLMAHNKXMVEMVCLHVISLMEALQXCNSTIFVKLIPMWLPMIQSNIKHLSAGLQLRLQAIQNHVNHHSLRTLPGSGQSSAGLAALRKWLQCTQFKMAQVEIQSSEAASQFYPL

SEQ ID NO: 2218 - protein, 110 aa, Homo sapiens
MEFPGADGCNQVDAEYLKVGSEGHFRVPALGYLDVRIVDTDYSSFAVLYIYKELEGALSTMVQLYSRTQDVSPQALKAFQDFYPTLGLPEDMMVMLPQSDACNPESKEAP

SEQ ID NO: 2219 - protein, 115 aa, Homo sapiens
  SITE (101): Xaa equals any of the naturally occurring L-amino acids
  SITE (106): Xaa equals any of the naturally occurring L-amino acids
ISLLWNLWQSVKIGCGEKLYPGHTKDSRNHLGQNLSFLHFIYLFPPPHSTHTLPTSSTSTFKHKDVRVFSLSVSWRTGCWERKGQMSKGGCRAGQADSGGXLEELXPSQTWVSKT

SEQ ID NO: 2220 - protein, 262 aa, Homo sapiens
  SITE (254): Xaa equals any of the naturally occurring L-amino acids
MECCRRATPGTLLLFLAFLLLSSRTARSEEDRDGLWDAWGPWSECSRTCGGGASYSLRRCLSSKSCEGRNIRYRTCSNVDCPPEAGDFRAQQCSAHNDVKHHGQFYEWLPVSNDPDNPCSLKCQAKGTTLVVELAPKVLDGTRCYTESLDMCISGLCQIVGCDHQLGSTVKEDNCGVCNGDGSTCRLVRGQYKSQLSATKSDDTVVAIPYGSRHIRLVLKGPDHLYLETKTLQGTKGENSLSSTGTFLVDNSSXTSRNFQTK

SEQ ID NO: 2221 - protein, 514 aa, Homo sapiens
ELCRQPKPSTVQACNRFNCPPAWYPAQWQPCSRTCGGGVQKREVLCKQRMADGSFLELPETFCSASKPACQQACKKDDCPSEWLLSDWTECSTSCGEGTQTRSAICRKMLKTGLSTVVNSTLCPPLPFSSSIRPCMLATCARPGRPSTKHSPHIAAARKVYIQTRRQRKLHFVVGGFAYLLPKTAVVLRCPARRVRKPLITWEKDGQHLISSTHVTVAPFGYLKIHRLKPSDAGVYTCSAGPAREHFVIKLIGGNRKLVARPLSPRSEEEVLAGRKGGPKEALQTHKHQNGIFSNGSKAEKRGLAANPGSRYDDLVSRLLEQGGWPGELLASWEAQDSAERNTTSEEDPGAEQVLLHLPFTMVTEQRRLDDILGNLSQQPEELRDLYSKHLVAQLAQEIFRSHLEHQDTLLKPSERRTSPVTLSPHKHVSGFSSSLRTSSTGDAGGGSRRPHRKPTILRKISAAQQLSASEVVTHLGQTVALASGTLSVFCTVRPSATQGLPSAGPGMEKKSVQ

SEQ ID NO: 2222 - protein, 1745 aa, Homo sapiens
MECCRRATPGTLLLFLAFLLLSSRTARSEEDRDGLWDAWGPWSECSRTCGGGASYSLRRCLSSKSCEGRNIRYRTCSNVDCPPEAGDFRAQQCSAHNDVKHHGQFYEWLPVSNDPDNPCSLKCQAKGTTLVVELAPKVLDGTRCYTESLDMCISGLCQIVGCDHQLGSTVKEDNCGVCNGDGSTCRLVRGQYKSQLSATKSDDTVVAIPYGSRHIRLVLKGPDHLYLETKTLQGTKGENSLSSTGTFLVDNSSVDFQKFPDKEILRMAGPLTADFIVKIRNSGSADSTVQFIFYQPIIHRWRETDFFPCSATCGGGYQLTSAECYDLRSNRVVADQYCHYYPENIKPKPKLQECNLDPCPARWEATPWTACSSSCGGGIQSRAVSCVEEDIQGHVTSVEEWKCMYTPKMPIAQPCNIFDCPKWLAQEWSPCTVTCGQGLRYRVVLCIDHRGMHTGGCSPKTKPHIKEECIVPTPCYKPKEKLPVEAKLPWFKQAQELEEGAAVSEEPSFIPKAWSACTVTCGVGTQVRIVRCQVLLSFSQSVADLPIDECEGPKPASQRACYAGPCSGEIPEFNPDETDGLFGGLQDFDELYDWEYEGFTKCSESCGGGVQEAVVSCLNKQTREPAEENLCVTSRRPPQLLKSCNLDPCPARWEIGKWSPCSLTCGVGLQTRDVFCSHLLSREMNETVILADELCRQPKPSTVQACNRFNCPPAWYPAQWQPCSRTCGGGVQKREVLCKQRMADGSFLELPETFCSASKPACQQACKKDDCPSEWLLSDWTECSTSCGEGTQTRSAICRKMLKTGLSTVVNSTLCPPLPFSSSIRPCMLATCARPGRPSTKHSPHIAAARKVYIQTRRQRKLHFVVGGFAYLLPKTAVVLRCPARRVRKPLITWEKDGQHLISSTHVTVAPFGYLKIHRLKPSDAGVYTCSAGPAREHFVIKLIGGNRKLVARPLSPRSEEEVLAGRKGGPKEALQTHKHQNGIFSNGSKAEKRGLAANPGSRYDDLVSRLLEQGGWPGELLASWEAQDSAERNTTSEEDPGAEQVLLHLPFTMVTEQRRLDDILGNLSQQPEELRDLYSKHLVAQLAQEIFRSHLEHQDTLLKPSERRTSPVTLSPHKHVSGFSSSLRTSSTGDAGGGSRRPHRKPTILRKISAAQQLSASEVVTHLGQTVALASGTLSVLLHCEAIGHPRPTISWARNGEEVQFSDRILLQPDDSLQILAPVEADVGFYTCNATNALGYDSVSIAVTLAGKPLVKTSRMTVINTEKPAVTVDIGSTIKTVQGVNVTINCQVAGVPEAEVTWFRNKSKLGSPHHLHEGSLLLTNVSSSDQGLYSCRAANLHGELTESTQLLILDPPQVPTQLEDIRALLAATGPNLPSVLTSPLGTQLVLDPGNSALLGCPIKGHPVPNITWFHGGQPIVTATGLTHHILAAGQILQVANLSGGSQGEFSCLAQNEAGVLMQKASLVIQDYWWSVDRLATCSASCGNRGVQQPRLRCLLNSTEVNPAHCAGKVRPAVQPIACNRRDCPSRWMVTSWSACTRSCGGGVQTRRVTCQKLKASGISTPVSNDMCTQVAKRPVDTQACNQQLCVEWAFSSWGQCNGPCIGPHLAVQHRQVFCQTRDGITLPSEQCSALPRPVSTQNCWSEACSVHWRVSLWTLCTATCGNYGFQSRRVECVHARTNKAVPEHLCSWGPRPANWQRCNITPCENMECRDTTRYCEKVKQLKLCQLSQFKSRCCGTCGKA

SEQ ID NO: 2223 - protein, 19 aa, Homo sapiens
ECCETAAPPGPHRRPESGQ

SEQ ID NO: 2224 - protein, 363 aa, Homo sapiens
MAAVLTWALALLSAFSATQARKGFWDYFSQTSGDKGRVEQIHQQKMAREPATLKDSLEQDLNNMNKFLEKLRPLSGSEAPRLPQDPVGMRRQLQEELEEVKARLQPYMAEAHELVGWNLEGLRQQLKPYTMDLMEQVALRVQELQEQLRVVGEDTKAQLLGGVDEAWALLQGLQSRVVHHTGRFKELFHPYAESLVSGIGRHVQELHRSVAPHAPASPARLSRCVQVLSRKLTLKAKALHARIQQNLDQLREELIRAFAGTGTEEGAGPDPQMLSEEVRQRLQAFRQDTYLQIAAFTRAIDQETEEVQQQLAPPPPGHSAFAPEFQQTDSGKVLSKLQARLDDLWEDITHSLHDQGHSHLGDP

SEQ ID NO: 2225 - protein, 183 aa, Homo sapiens
  SITE (86): Xaa equals any of the naturally occurring L-amino acids
  SITE (146): Xaa equals any of the naturally occurring L-amino acids
MAVGKFLLGSLLLLSLQLGQGWGPDARGVPVADGEFSSEQVAKAGGTWLGKDFQGPSVTSQLSPALTLLTVSALPSHRHPPPPCPXAPSPVWSMPAVEPDPVRGRARPGLRLIGEVIFRYCAGSCPRGARTQHGLALARLQGQGRXHGGPCCRPTRYTDVAFLDDRHAGSGCPSSRRLCGCGG

SEQ ID NO: 2226 - protein, 252 aa, Homo sapiens
  SITE (86): Xaa equals any of the naturally occurring L-amino acids
  SITE (116): Xaa equals any of the naturally occurring L-amino acids
  SITE (135): Xaa equals any of the naturally occurring L-amino acids
  SITE (146): Xaa equals any of the naturally occurring L-amino acids
MAVGKFLLGSLLLLSLQLGQGWGPDARGVPVADGEFSSEQVAKAGGTWLGKDFQGPSVTSQLSPALTLLTVSALPSHRHPPPPCPXAPSPVWSMPAVEPDPVRGRARPGLRLIGEXHLPLLRRQLPPWCPHPAWXGAGPAAGPGPXPRRALLPAHSLHRRGLPRRPPRWQRLPQLSAALRLWWLRVPGLAPRSCSAGGARLTYLLETWMQRQRGGEWAGATSSECNKGHHSPGKKKKKKKKKKKKLEGGSRY

SEQ ID NO: 2227 - protein, 150 aa, Homo sapiens [sequence omitted]

SEQ ID NO: 2228 - protein, 125 aa, Homo sapiens
MIPFPACLLLALFPKVQVGRTTSAYFSTIPSMPARSQINLPVESGSALLEPRGKGRVERVCPVAWSSMVASCLPSPSSGGPEGSLGTVPQILTQGPAWGRDGCRQNALYRDFLLLGRCVSPTICL

SEQ ID NO: 2229 - protein, 766 aa, Homo sapiens
MIWRSRAGAELFSLMALWEWIALSLHCWVLAVAAVSDQHATSPFDWLLSDKGPFHRSQEYTDFVDRSRQGFSTRYKIYREFGRWKVNNLAVERRNFLGSPLPLAPEFFRNIRLLGRRPTLQQITENLIKKYGTHFLLSATLGGEESLTIFVDKRKLSKRAEGSDSTTNSSSVTLETLHQLAASYFIDRDSTLRRLHHIQIASTAIKVTETRTGPLGCSNYDNLDSVSSVLVQSPENKIQLQGLQVLLPDYLQERFVQAALSYIACNSEGEFICKENDCWCHCGPKFPECNCPSMDIQAMEENLLRITETWKAYNSDFEESDEFKLFMKRLPMNYFLNTSTIMHLWTMDSNFQRRYEQLENSMKQLFLKAQKIVHKLFSLSKRCHKQPLISLPRQRTSTYWLTRIQSFLYCNENGLLGSFSEETHSCTCPNDQVVCTAFLPCTVGDASACLTCAPDNRTRCGTCNTGYMLSQGLCKPEVAESTDHYIGFETDLQDLEMKYLLQKTDRRIEVHAIFISNDMRLNSWFDPSWRKRMLLTLKSNKYKSSLVHMILGLSLQICLTKNSTLEPVLAVYVNPFGGSHSESWFMPVNENSFPDWERTKLDLPLQCYNWTLTLGNKWKTFFETVHIYLRSRIKSNGPNGNESIYYEPLEFIDPSRNLGYMKINNIQVFGYSMHFDPEAIRDLILQLDYPYTQGSQDSALLQLLEIRDRVNKLSPPGQRRLDLFSCLLRHRLKLSTSEVVRIQSALQAFNAKLPNTMDYDTTKLCS

SEQ ID NO: 2230 - protein, 61 aa, Homo sapiens; identical to SEQ ID NO: 580

SEQ ID NO: 2231 - protein, 133 aa, Homo sapiens
MRMSLAQRVLLTWLFTLLFLIMLVLKLDEKAPWNWFLIFIPVWIFDTILLVLLIVKMAGRCKSGFDPRHGSHNIKKKAWYLIAMLLKLAFCLALCAKLEQFTTMNLSYVFIPLWALLAGALTELGYNVFFVRD

SEQ ID NO: 2232 - protein, 131 aa, Homo sapiens [sequence omitted]

SEQ ID NO: 2233 - protein, 298 aa, Homo sapiens; identical to SEQ ID NO: 2196

SEQ ID NO: 2234 - protein, 158 aa, Homo sapiens; identical to SEQ ID NO: 1633

SEQ ID NO: 2235 - protein, 58 aa, Homo sapiens
MTKALIPTPFFLAAMWPLWQHSWAQTLRSQRQEADAWAKAGAGNSRGSLAWRLLMSSG

SEQ ID NO: 2236 - protein, 71 aa, Homo sapiens
MLVAAIVFISFGVVAAFCCAIVDGVFAAQHIEPKAPHHGKMPVYSSGVGYLYDVYQTEVSRSTEIHVGLLN

SEQ ID NO: 2237 - protein, 605 aa, Homo sapiens
MGRLLRAARLPPLLSPLLLLLVGGAFLGACVAGSDEPGPEGLTSTSLLDLLLPTGLEPLDSEEPSETMGLGAGLGAPGSGFPSEENEESRILQPPQYFWEEEEELNDSSLDLGPTADYVFPDLTEKAGSIEDTSQAQELPNLPSPLPKMNLVEPPWHMPPREEEEEEEEEEEREKEEVEKQEEEEEEELLPVNGSQEEAKPQVRDFSLTSSSQTPGATKSRHEDSGDQASSGVEVESSMGPSLLLPSVTPTTVTPGDQDSTSQEAEATVLPAAGLGVEFEAPQEASEEATAGAAGLSGQHEEVPALPSFPQTTAPSGAEHPDEDPLGSRTSASSPLAPGDMELTPSSATLGQEDLNQQLLEGQAAEAQSRIPWDSTQVICKDWSNLAGKNYIILNMTENIDCEVFRQHRGPQLLALVEEVLPRHGSGHHGAWHISLSKPSEKEQHLLMTLVGEQGVVPTQDVLSMLGDIRRSLEEIGIQNYSTTSSCQARASQVRSDYGTLFVVLVVIGAICIIIIALGLLYNCWQRRLPKLKHVSHGEELRFVENGCHDNPTLDVASDSQSEMQEKHPSLNGGGALNGPGSWGALMGGKRDPEDSDVFEEDTHL

SEQ ID NO: 2238 - protein, 432 aa, Homo sapiens
MDARWWAVVVLAAFPSLGAGGETPEAPPESWTQLWFFRFVVNAAGYASFMVPGYLLVQYFRRKNYLETGRGLCFPLVKACVFGNEPKASDEVPLAPRTEAAETTPMWQALKLLFCATGLQVSYLTWGVLQERVMTRSYGATATSPGERFTDSQFLVLMNRVLALIVAGLSCVLCKQPRHGAPMYRYSFASLSNVLSSWCQYEALKFVSFPTQVLAKASKVIPVMLMGKLVSRRSYEHWEYLTATLISIGVSMFLLSSGPEPRSSPATTLSGLILLAGYIAFDSFTSNWQDALFAYKMSSVQMMFGVNFFSCLFTVGSLLEQGALLEGTRFMGRHSEFAAHALLLSICSACGQLFIFYTIGQFGAAVFTIIMTLRQAFAILLSCLLYGHTVTVVGGLGVAVVFAALLLRVYARGRLKQRGKKAVPVESPVQKV

SEQ ID NO: 2239 - protein, 432 aa, Homo sapiens; identical to SEQ ID NO: 2238

SEQ ID NO: 2240 - protein, 69 aa, Homo sapiens
MKAVVLLKAFSFSLCSAISPVTPGFRQTINVLDTVAFSAFFIYLFTVTASINFYAYFSSFLAGAPFIKI

SEQ ID NO: 2241 - protein, 57 aa, Homo sapiens [sequence omitted]

SEQ ID NO: 2242 - protein, 145 aa, Homo sapiens
MLRTLVLKQTLDLLLPLLEALLVLGVPQHLELQPLPVQVSLLLLQLLDLGSLKSHRLHHFHSKALQLPVLDHLDFQDFQLPWQQVLSELPVAPAFGGGSSVAGFGSPGLTFSHWLFLSHPVDTFGNSQAYPTSLSALQASINCNR

SEQ ID NO: 2243 - protein, 77 aa, Homo sapiens
MAICQFFLQGRCRFGDRCWNEHPGARGAGGGRQQPQQQPSGNNRRGWNTTSQRYSNVIQPSSFSKSTPWGGSRDQET

SEQ ID NO: 2244 - protein, 86 aa, Homo sapiens [sequence omitted]

SEQ ID NO: 2245 - protein, 208 aa, Homo sapiens; identical to SEQ ID NO: 732

SEQ ID NO: 2246 - protein, 215 aa, Homo sapiens
MRLPAWCRHTTLAISCWHCLVLARASADSASLPTISHLGVKPLSVGWGAPSTLPVSPCGGKPAAPTSASPAAAPLRFWRPGASGGGAGGTRRLALCRLVTARTTLATGTPGLSARPRQRPCLLPVLPRRPAELSVSLEPSPGSSGRGFLCLPFCKRDADTSLGQTLTSSCSLSSILVGGTLRPRCSCPPFTQRSAFHLRTPHNQYHHGSTSLASH

SEQ ID NO: 2247 - protein, 139 aa, Homo sapiens; identical to SEQ ID NO: 726

SEQ ID NO: 2248 - protein, 363 aa, Homo sapiens
MKTLLLLVGLLLTWENGRVLGDQMVSDTELQEMSTEGSKYINREIKNALKGVKQIKTLIEQTNEERKSLLTNLEEAKKKKEDALNDTKDSEMKLKASQGVCNDTMMALWEECKPCLKQTCMKFYARVCRSSTGLVGHQVEEFLNQSSPFYFWINGDRIDSLLENDRQQTHALDVMQDSFDRASSIMDELFQDRFFTREAQDPFHFSPFSSFQRRPFFFNIKHRFARNIMPFPGYQPLNFHDMFQPFFDMIHQAQQAMDVNLHRLPHFPMEFTEEDNQDGAVCKEIRHNSTGCLKMKDQCEKCREILSVDCSSNNPAQVQLRQELNNSLQIAEKFTKLVRRAAAVLPGEDVQHVLPAEAAGRAV

SEQ ID NO: 2249 - protein, 85 aa, Homo sapiens [sequence omitted]

SEQ ID NO: 2250 - protein, 184 aa, Homo sapiens; identical to SEQ ID NO: 347

SEQ ID NO: 2251 - protein, 352 aa, Homo sapiens [sequence omitted]

SEQ ID NO: 2252 - protein, 448 aa, Homo sapiens
MAWASRLGLLLALLLPVVGASTPGTVVRLNKAALSYVSEIGKAPLQRALQVTVPHFLDWSGEALQPTRIRILNVHVPRLHLKFIAGFGVRLLAAANFTFKVFRAPEPLELTLPVELLADTRVTQSSIRTPVVSISACSLFSGHANEFDGSNSTSHALLVLVQKHIKAVLSNKLCLSISNLVQGVNVHLGTLIGLNPVGPESQIRYSMVSVPTVTSDYISLEVNAVLFLLGKPIILPTDATPFVLPRHVGTEGSMATVGLSQQLFDSALLLLQKAGALNLDITGQLRSDDNLLNTSALGRLIPEVARQFPEPMPVVLKVRLGATPVAMLHTNNATLRLQPFVEVLATASNSAFQSLFSLDVVVNLRLQLSVSKVKLQGTTSVLGDVQLTVASSNVGFIDTDQVRTLMGTVFEKPLLDHLNALLAMGIALPGVVNLHYVPLRSLSMRATW

SEQ ID NO: 2253 - protein, 183 aa, Homo sapiens
MEPEEGTPLWRLQKLPAELGPQLLHKIIDGICGRAYPVYQDYHTVWESEEWMHVLEDIAKFFKAIVGKNLPDEEIFQQLNQLNSLHQETIMKCVKSRKDEIKQALSREIVAISSAQLQDFDWQVKLALSSDKIAALRMPLLSLHLDVKENGEVKPYSIEMSREELQNLIQSLEAANKVVLQLK

SEQ ID NO: 2254 - protein, 121 aa, Homo sapiens
MPCGRQHLQNLDDAVNGSAWTILLLTENFLRDTWCNFQFYTSLMNSVNRQHKYNSVIPMRPLNNPLPRERTPFALQTINALEEESRGFPTQVERIFQESVYKTQQTIWKETRNMVQRQFIA

SEQ ID NO: 2255 - protein, 251 aa, Homo sapiens
MLFHYDWISIPLVYTQVVTIAVYSFFALSLVGRQFVEPEAGAAKPQKLLKPGQEPAPALGDPDMYVPLTTLLQFFFYAGWLKVAEQIINPFGEDDDDFETNQLIDRNLQVSLLSVDEMYQNLPPAEKDQYWDEDQPQPPYTVATAAESLRPSFLGSTFNLRMSDDPEQSLQVEASPGSGRPAPAAQTPLLGRFLGVGAPSPAISLRNFGRVRGTPRPPHLLRFRAEEGGDPEAAARIEEESAESGDEALEP

SEQ ID NO: 2256 - protein, 125 aa, Homo sapiens
MRPGKKVLVMGIVDLNPESFAISLTCGDSEDPPADVAIELKAVFTDRQLLRNSCISGERGEEQSAIPYFPFIPDQPFRVEILCEHPRFRVFVDGHQLFDFYHRIQTLSAIDTIKINGDLQITKLG

SEQ ID NO: 2257 - protein, 170 aa, Homo sapiens
MISIHNEEENAFILDTLKKQWKGPDDILLGMFYDTDDASFKWFDNSNMTFDKWTDQDDDEDLVDTCAFLHIKTGEWKKGNCEVSSVEGTLCKTAIPYKRKYLSDNHILISALVIASTVILTVLGAIIWFLYKKHSDSRFTTVFSTAPQSPYNEDCVLVVGEENEYPVQFD

SEQ ID NO: 2258 - protein, 595 aa, Homo sapiens
MLLLLLLLPPLLCGRVGAKEQKDYLLTMQKSVTVQEGLCVSVLCSFSYPQNGWTASDPVHGYWFRAGDHVSRNIPVATNNPARAVQEETRDRFHLLGDPQNKDCTLSIRDTRESDAGTYVFCVERGNMKWNYKYDQLSVNVTASQDLLSRYRLEVPESVTVQEGLCVSVPCSVLYPHYNWTASSPVYGSWFKEGADIPWDIPVATNTPSGKVQEDTHGRFLLLGDPQTNNCSLSIRDARKGDSGKYYFQVERGSRKWNYIYDKLSVHVTALTHMPTFSIPGTLESGHPRNLTCSVPWACEQGTPPTITWMGASVSSLDPTITRSSMLSLIPQPQDHGTSLTCQVTLPGAGVTMTRAVRLNISYPPQNLTMTVFQGDGTASTTLRNGSALSVLEGQSLHLVCAVDSNPPARLSWTWGSLTLSPSQSSNLGVLELPRVHVKDEGEFTCRAQNPLGSQHISLSLSLQNEYTGKMRPISGVTLGAFGGAGATALVFLYFCIIFVVVRSCRKKSARPAVGVGDTGMEDANAVRGSASQGPLIESPADDSPPHHAPPALATPSPEEGEIQYASLSFHKARPQYPQEQEAIGYEYSEINIPK

SEQ ID NO: 2259 - protein, 274 aa, Homo sapiens
MSSNGIPECYAEEDEFSGLETDTAVPTEEAYVIYDEDYEFETSRPPTTTEPSTTATTPRVIPEEGAISSFPEEEFDLAGRKRFVAPYVTYLNKDPSAPCSLTDALDHFQVDSLDEIIPNDLKKSDLPPQHAPRNITVVAVEGCHSFVIVDWDKATPGDVVTGYLVYSASYEDFIRNKWSTQASSVTHLPIENLKPNTRYYFKVQAQNPHGYGPISPSVSFVTESDNPLLVVRPPGGEPIWIPFAFKHDPSYTDCHGRQYVKRTLVSKVRGSWSL

SEQ ID NO: 2260 - protein, 468 aa, Homo sapiens
MPALHTLNLDHNLIDALPPGAFAQLGQLSRLDLTSNRLATLAPDPLFSRGRDAEASPAPLVLSFSGNPLHCNCELLWLRRLARPDDLETCASPPGLAGRYFWAVPEGEFSCEPPLIARHTQRLWVLEGQRATLRCRALGDPAPTMHWVGPDDRLVGNSSRARAFPNGTLEIGATGAGDAGGYTCIATNPAGEATARVELRVLALPHGGNSSAEGGRPGPSDIAASARTAAEGEGTLESEPAVQVTEVTATSGLVSWGPGRPADPVWMFQIQYNSSEDETLIYRIVPASSHHFLLKHLVPGADYDLCLLALSPAAGPSDLTATRLLGCAHFSTLPASPLCHALQAHVLGGTLTVAVGGVLVAALLVFTVALLVRGRGAGNGRLPLKLSHVQSQTNGGPSPTPKAHPPRSPPPRPQRSCSLDLGDAGCYGYARRLGGAWARRSHSVHGGLLGAGCRGVGGSAERLEESVV

SEQ ID NO: 2261 - protein, 86 aa, Homo sapiens [sequence omitted]

SEQ ID NO: 2262 - protein, 105 aa, Homo sapiens
MKGSRALLLVALTLFCICRMATGEDNDEFFMDFLQTLLVGTPEELYEGTLGKYNVNEDAKAAMTELKSCIDGLQPMHKAELVKLLVQVLGSQDGAGTDYKDDDDK

SEQ ID NO: 2263 - protein, 167 aa, Homo sapiens
MAASVCSGLLGPRVLSWSRELPCAWRALHTSPVCAKNRAARVRVSKGDKPVTYEEAHAPHYIAHRKGWLSLHTGNLDGEDHAAERTVEDVFLRKFMWGTFPGCLADQLVLKRRGNQLEICAVVLRQLSPHKYYFLVGYSETLLSYFYKCPVRLHLQTVPSKVVYKYL

SEQ ID NO: 2264 - protein, 203 aa, Homo sapiens
MARPRPREYKAGDLVFAKMKGYPHWPARIDELPEGAVKPPANKYPIFFFGTHETAFLGPKDLFPYKEYKDKFGKSNKRKGFNEGLWEIENNPGVKFTGYQAIQQQSSSETEGEGGNTADASSEEEGDRVEEDGKGKRKNEKAGSKRKKSYTSKKSSKQSRKSPGDEDDKDCKEEENKSSSEGGDAGNDTRNTTSDLQKTSEGT

SEQ ID NO: 2265 - protein, 253 aa, Homo sapiens
MRSGKMAPKPQSRCTSTRSAGEAPSENQSPSKGPEEASSEVQDTNEVHVPGDQDEPQTLGKKGSKNNISVYMTLNQKKSDSSSASVCSIDSTDDLKSSNSECSSSESFDFPPGSMHAPSTSSTSSSSKEEKKLSNSLKMKVFSKNVSKCVTPDGRTICVGDIVWAKIYGFPWWPARILTITVSRKDNGLLVRQEARISWFGSPTTSFLALSQLSPFLENFQSRFNKKRKGLYRKAITEAAKAAKQLTPEVRAC

SEQ ID NO: 2266 - protein, 314 aa, Homo sapiens
MPHAFKPGDLVFAKMKGYPHWPARIDDIADGAVKPPPNKYPIFFFGTHETAFLGPKDLFPYDKCKDKYGKPNKRKGFNEGLWEIQNNPHASYSAPPPVSSSDSEAPEANPADGSDADEDDEDRGVMAVTAVTATAASDRMESDSDSDKSSDNSGLKRKTPALKMSVSKRARKASSDLDQASVSPSEEENSESSSESEKTSDQDFTPEKKAAVRAPRRGPLGGRKKKKAPSASDSDSKADSDGAKPEPVAMARSASSSSSSSSSSDSDVSVKKPPRGRKPTEKPLPKPRGRKPKPERPPSSSSSDSDSDEVDRIT

SEQ ID NO: 2267 - protein, 281 aa, Homo sapiens
MGSRGQGLLLAYCLLLAFASGLVLSRVPHVQGEQQEWEGTEELPSPPDHAERAEEQHEKYRPSQDQGLPASRCLRCCDPGTSMYPATAVPQINITILKGEKGDRGDRGLQGKYGKTGSAGARGHTGPKGQKGSMGAPGERCKSHYAAFSVGRKKPMHSNHYYQTVIFDTEFVNLYDHFNMFTGKFYCYVPGLYFFSLNVHTWNQKETYLHIMKNEEEVAILFAQVGDRSIMQSQSLMLELREQDQVWVRLYKGERENAIFSEELDTYITFSGYLVKHATEP

SEQ ID NO: 2268 - DNA, 733 bp, Homo sapiens
gggatccggagcccaaatcttctgacaaaactcacacatgcccaccgtgcccagcacctgaattcgagggtgcaccgtcagtcttcctcttccccccaaaacccaaggacaccctcatgatctcccggactcctgaggtcacatgcgtggtggtggacgtaagccacgaagaccctgaggtcaagttcaactggtacgtggacggcgtggaggtgcataatgccaagacaaagccgcgggaggagcagtacaacagcacgtaccgtgtggtcagcgtcctcaccgtcctgcaccaggactggctgaatggcaaggagtacaagtgcaaggtctccaacaaagccctcccaacccccatcgagaaaaccatctccaaagccaaagggcagccccgagaaccacaggtgtacaccctgcccccatcccgggatgagctgaccaagaaccaggtcagcctgacctgcctggtcaaaggcttctatccaagcgacatcgccgtggagtgggagagcaatgggcagccggagaacaactacaagaccacgcctcccgtgctggactccgacggctccttcttcctctacagcaagctcaccgtggacaagagcaggtggcagcaggggaacgtcttctcatgctccgtgatgcatgaggctctgcacaaccactacacgcagaagagcctctccctgtctccgggtaaatgagtgcgacggccgcgactctagaggat

SEQ ID NO: 2269 - protein, 5 aa, Artificial sequence
  misc_structure: membrane proximal motif of class 1 cytokine receptors
  misc_feature (3): Xaa equals any
WSXWS

SEQ ID NO: 2270 - DNA, 86 bp, Artificial Sequence
  primer_bind: forward primer useful for generation of a synthetic gamma activation site (GAS) containing promoter e lement
gcgcctcgagatttccccgaaatctagatttccccgaaatgatttccccgaaatgatttccccgaaatatctgccatctcaattag

SEQ ID NO: 2271 - DNA, 27 bp, Artificial Sequence
  primer_bind: reverse primer useful for generation of a synthetic gamma activation site (GAS) containing promoter e lement
gcggcaagctttttgcaaagcctaggc

SEQ ID NO: 2272 - DNA, 271 bp, Artificial Sequence
  misc_feature: Synthetic GAS-SV40 promoter sequence
ctcgagatttccccgaaatctagatttccccgaaatgatttccccgaaatgatttccccgaaatatctgccatctcaattagtcagcaaccatagtcccgcccctaactccgcccatcccgcccctaactccgcccagttccgcccattctccgccccatggctgactaattttttttatttatgcagaggccgaggccgcctcggcctctgagctattccagaagtagtgaggaggcttttttggaggcctaggcttttgcaaaaagctt

SEQ ID NO: 2273 - DNA, 32 bp, Artificial sequence
  primer_bind: primer useful for generation of a EGR/SEAP reporter construct
gcgctcgagggatgacagcgatagaaccccgg

SEQ ID NO: 2274 - DNA, 31 bp, Artificial Sequence
  primer_bind: primer useful for generation of a EGR/SEAP reporter construct
gcgaagcttcgcgactccccggatccgcctc

SEQ ID NO: 2275 - DNA, 12 bp, Artificial Sequence
  misc_binding: NF-KB binding site
ggggactttccc

SEQ ID NO: 2276 - DNA, 73 bp, Artificial Sequence
  primer_bind: forward primer useful for generation of a vector containing the NF-KB promoter element
gcggcctcgaggggactttcccggggactttccggggactttccgggactttccatcctgccatctcaattag

SEQ ID NO: 2277 - DNA, 256 bp, Artificial Sequence
  misc_feature: Synthetic NF-KB/SV40 promoter
ctcgaggggactttcccggggactttccggggactttccgggactttccatctgccatctcaattagtcagcaaccatagtcccgcccctaactccgcccatcccgcccctaactccgcccagttccgcccattctccgccccatggctgactaattttttttatttatgcagaggccgaggccgcctcggcctctgagctattccagaagtagtgaggaggcttttttggaggcctaggcttttgcaaaaagctt

SEQ ID NO: 2278 - DNA, 1041 bp, Homo sapiens
tcgacccacgcgtccgcccacgcgtccgcccacgcgtccgggcgcaggacgtgcactatggctcggggctcgctgcgccggttgctgcggctcctcgtgctggggctctggctggcgttgctgcgctccgtggccggggagcaagcgccaggcaccgccccctgctcccgcggcagctcctggagcgcggacctggacaagtgcatggactgcgcgtcttgcagggcgcgaccgcacagcgacttctgcctgggctgcgctgcagcacctcctgcccccttccggctgctttggcccatccttgggggcgctctgagcctgaccttcgtgctggggctgctttctggctttttggtctggagacgatgccgcagagagagaagttcaccacccccatagaggagaccggcggagagggctgcccagctgtggcgctgatccagtgacaatgtgccccctgccagccggggctcgcccactcatcattcattcatccattctagagccagtctctgcctcccagacgcggcgggagcaagctcctccaaccacaaggggggtggggggcggtgaatcacctcygaggcctgggcccagggttcaggggaacttccaaggtgtctggttgccctgcctctggctccagaacagaaagggagcctcacgctggctcacacaaaacagctgacactgactaaggaactgcagcatttgcacaggggaggggggtgccctccttcgtagaggccctgggggccaggctgacttggggggcagacttgacactaggccccactcactcagatgtcctgaaattccaccacgggggtcaccctggggggttagggacctatttttaacactagggggctggcccactaggagggctggccctaagatacagacccccccaactccccaaagcggggaggagatatttattttggggagagtttggaggggagggagaatttattaataaaagaatctttaactttaaaaaaaaaaaaaaaaaagggcggccgctctagaggatccctc

SEQ ID NO: 2279 - protein, 114 aa, Homo sapiens
  SITE (114): Xaa equals any of the naturally occurring L-amino acids
MARGSLRRLLRLLVLGLWLALLRSVAGEQAPGTAPCSRGSSWSADLDKCMDCASCRARPHSDFCLGCAAAPPAPFRLLWPILGGALSLTFVLGLLSGFLVWRRCRRERSSPPPX

SEQ ID NO: 2280 - DNA, 1412 bp, Homo sapiens
  SITE (1362): n equals a, t, g, or c
  SITE (1369): n equals a, t, g, or c
  SITE (1397): n equals a, t, g, or c
cccttcatctgcgttgccaggaaccctgtcagcagaaacttctcaagccccatccttgccaggaagctctgtgaaggtgctgctgatgacccagattcctccatggtcctcctgtgtctcctgttggtgcccctcctgctcagtctctttgtactggggctatttctttggtttctgaagagagagagacaagaagagtacattgaagagaagaagagagtggacatttgtcgggaaactcctaacatatgcccccattctggagagaacacagagtacgacacaatccctcacactaatagaacaatcctaaaggaagatccagcaaatacggtttactccactgtggaaataccgaaaaagatggaaaatccccactcactgctcacgatgccagacacaccaaggctatttgcctatgagaatgttatctagacagcagtgcactcccctaagtctctgctcaaaaaaaaaacaattctcggcccaaagaaaacaatcagaagaattcactgatttgactagaaacatcaaggaagaatgaagaacgttgacttttttccaggataaattatctctgatgcttctttagatttaagagttcataattccatccactgctgagaaatctcctcaaacccagaaggtttaatcacttcatcccaaaaatgggattgtgaatgtcagcaaaccataaaaaaagtgcttagaagtattcctataaaaatgtaaatgcaaggtcacacatattaatgacagcctgttgtattaatgatggctccaggtcagtgtctggagtttcattccatcccagggcttggatgtcaggattataccaagagtcttgctaccaggagggcaagaagaccaaaacagacagacaagtccagcagaagcagatgcacctgacaaaaatggatgtattaattggctctataaactatgtgcccagcaytatgctgagcttacactaattggtcagacatgctgtctgccctcatgaaattggctccaaatgawtgaactactttcatgagcagttgtagcaggcctgaccacagattcccagagggccaggtgtggatccacaggacttgaaggtcaaagttcacaaagatgaagaatcagggtagctgaccatgtttggcagatactataatggagacacagaagtgtgcatggcccaaggacaaggacctccagccaggcttcatttatgcacttgtctgcaaaagaaaagtctaggttttaaggctgtgccagaacccatcccaataaagagaccgagtctgaagtcacattgtaaatctagtgtaggagacttggagtcaggcagtgagactggtggggcacggggggcantgggtantgtaaaccttttaaagatggttaattcntcattagtgtttttt

SEQ ID NO: 2281 - protein, 110 aa, Homo sapiens
MVLLCLLLVPLLLSLFVLGLFLWFLKRERQEEYIEEKKRVDICRETPNICPHSGENTEYDTIPHTNRTILKEDPANTVYSTVEIPKKMENPHSLLTMPDTPRLFAYENVI

What is claimed:

1. An albumin fusion protein comprising a member selected from the group consisting of:
(a) a Therapeutic protein X or a fragment or variant of a Therapeutic X and albumin or an albumin fragment or variant thereof;
(b) a Therapeutic protein X or a fragment or variant of a Therapeutic X and albumin or an albumin fragment or variant thereof, wherein said albumin or albumin fragment or variant thereof comprises the amino acid sequence of SEQ ID NO:18;
(c) a Therapeutic protein X or a fragment or variant of a Therapeutic X and albumin or an albumin fragment or variant thereof, of (a) or (b), wherein said fragment or variant of a Therapeutic X has a biological activity of the Therapeutic protein X, and wherein said albumin fragment or variant thereof has albumin activity;
(d) a Therapeutic protein X or a fragment of variant of a Therapeutic X and albumin or an albumin fragment or variant thereof, of (c), wherein said albumin activity is the ability to prolong the shelf life of the Therapeutic protein X compared to the shelf-life of the Therapeutic protein X in an unfused state;
(e) a Therapeutic protein X or a fragment of variant of a Therapeutic X and albumin or a fragment or variant thereof, of (c), wherein said albumin activity is the ability to prolong the serum half-life of the Therapeutic protein X compared to the serum half-life of the Therapeutic protein X in an unfused state;
(f) a Therapeutic protein X or a fragment of variant of a Therapeutic X and albumin or an albumin fragment or variant thereof, of (a)-(e), wherein the albumin fragment or variant comprises the amino acid sequence of amino acids 1-387 of SEQ ID NO:18;
(g) a Therapeutic protein X or a fragment of variant of a Therapeutic X and albumin or an albumin fragment or variant thereof, of (a) to (f), wherein the Therapeutic protein X or a fragment of variant of a Therapeutic X, is fused to the N-terminus of albumin, or the N-terminus of the albumin fragment or variant thereof;
(h) a Therapeutic protein X or a fragment of variant of a Therapeutic X and albumin or an albumin fragment or variant thereof, of (a) to (f), wherein the Therapeutic protein X or a fragment of variant of a Therapeutic X, is fused to the C-terminus of albumin, or the C-terminus of the albumin fragment or variant thereof;
(i) a Therapeutic protein X or a fragment of variant of a Therapeutic X and albumin or an albumin fragment or variant thereof, of (a) to (f), wherein the Therapeutic protein X or a fragment of variant of a Therapeutic X, is fused to the N-terminus and the C-terminus of albumin, or the N-terminus and the C-terminus of the albumin fragment or variant thereof;
(j) a Therapeutic protein X or a fragment of variant of a Therapeutic X and albumin or an albumin fragment or variant thereof, of (a) to (f), which comprises a first Therapeutic protein X, or fragment or variant thereof, and a second Therapeutic protein X, or fragment or variant thereof, wherein said first Therapeutic protein X, or fragment or variant thereof, is different from said second Therapeutic protein X, or fragment or variant thereof;
(k) a Therapeutic protein X or a fragment of variant of a Therapeutic X and albumin or an albumin fragment or variant thereof, of (a) to (j), wherein the Therapeutic protein X or a fragment of variant of a Therapeutic X, is separated from the albumin or the albumin fragment or variant thereof by a linker;
(l) a Therapeutic protein X or a fragment of variant of a Therapeutic X and albumin or an albumin fragment or variant thereof, of (a) to (k), wherein the albumin fusion protein has the following formula:
R1-L-R2; R2-L-R1; or R1-L-R2-L-R1,
and further wherein R1 is Therapeutic protein: X, or fragment or variant thereof, L is a peptide linker, and R2 is albumin comprising the amino acid sequence of SEQ ID NO:1 or a fragment or variant of albumin;
(m) a Therapeutic protein X or a fragment of variant of a Therapeutic X and albumin or an albumin fragment or variant thereof, of (a) to (l), wherein shelf-life of the albumin fusion protein is greater than the shelf-life of the Therapeutic protein X or a fragment of variant of a Therapeutic X, in an unfused state;
(n) a Therapeutic protein X or a fragment of variant of a Therapeutic X and albumin or an albumin fragment or variant thereof, of (a) to (l), wherein serum half-life of the albumin fusion protein is greater than the serum half-life of the Therapeutic protein X or a fragment of variant of a Therapeutic X, in an unfused state;
(o) a Therapeutic protein X or a fragment of variant of a Therapeutic X and albumin or an albumin fragment or variant thereof, of (a) to (l), wherein the in vitro biological activity of a Therapeutic protein X or a fragment of variant of a Therapeutic X of said albumin fusion protein is greater than the in vitro biological activity of the a Therapeutic protein X or a fragment of variant of a Therapeutic X, in an unfused state; and
(p) a Therapeutic protein X or a fragment of variant of a Therapeutic X and albumin or an albumin fragment or variant thereof, of (a) to (l), wherein the in vivo biological activity of a Therapeutic protein X or a fragment of variant of a Therapeutic X of said albumin fusion protein is greater than the in vivo biological activity of the a Therapeutic protein X or a fragment of variant of a Therapeutic X, in an unfused state;

2. The albumin fusion protein of claim 1, which is non-glycosylated.

3. The albumin fusion protein of claim 1, which is expressed in yeast.

4. The albumin fusion protein of claim 3, wherein the yeast is glycosylation deficient.

5. The albumin fusion protein of claim 3 wherein the yeast is glycosylation and protease deficient.

6. The albumin fusion protein of claim 1, which is expressed by a mammalian cell.

7. The albumin fusion protein of claim 1, wherein the albumin fusion protein is expressed by a mammalian cell in culture.

8. The albumin fusion protein of claim 1, wherein the albumin fusion protein further comprises a secretion leader sequence.

9. A composition comprising the albumin fusion protein of claim 1 and a pharmaceutically acceptable carrier.

10. A kit comprising the composition of claim 9.

11. A method of treating a disease or disorder in a patient, comprising the step of administering the albumin fusion protein of claim 1.

12. The method of claim 11, wherein the disease or disorder comprises indication Y.

13. A method of treating a patient with a disease or disorder that is modulated by Therapeutic protein X or a fragment of variant of a Therapeutic X, comprising the step of administering an effective amount of the albumin fusion protein of claim 1.

14. The method of claim 13, wherein the disease or disorder is indication Y.

15. A method of extending the shelf life of Therapeutic protein X or a fragment of variant of a Therapeutic X, comprising the step of fusing the Therapeutic protein X or a fragment of variant of a Therapeutic X, to albumin, or albumin fragment or variant thereof, sufficient to extend the shelf-life of the Therapeutic protein X or a fragment of variant of a Therapeutic X, compared to the shelf-life of the Therapeutic protein X or a fragment of variant of a Therapeutic X, in an unfused state.

16. A method of prolonging the serum half-life of Therapeutic protein X or a fragment of variant of a Therapeutic X, comprising the step of fusing the Therapeutic protein X or a fragment of variant of a Therapeutic X, to albumin, or albumin fragment or variant thereof, sufficient to prolong the serum half-life of the Therapeutic protein X or a fragment of variant of a Therapeutic X, compared to the serum half-life of the Therapeutic protein X or a fragment of variant of a Therapeutic X, in an unfused state.

17. A nucleic acid molecule comprising a polynucleotide sequence encoding the albumin fusion protein of claim 1.

18. A vector comprising the nucleic acid molecule of claim 17.

19. A host cell comprising the nucleic acid molecule of claim 17.
